(19) United States
(12) Patent Application Publication
(10) Pub. No.: US 2021/0275657 A1
(43) Pub. Date: Sep. 9, 2021

(54) NEOANTIGENS AND USES THEREOF

(71) Applicant: BioNTech US Inc., Cambridge, MA (US)

(72) Inventors: Vikram Juneja, Waltham, MA (US); Zhengxin Dong, Holliston, MA (US); Robyn Jessica Eisert, Somerville, MA (US)

(21) Appl. No.: 17/253,922

(22) PCT Filed: Jun. 19, 2019
(86) PCT No.: PCT/US2019/038061

§ 371 Date: Dec. 18, 2020

Related U.S. Application Data
(60) Provisional application No. 62/687,191, filed on Jun. 19, 2018.
(60) Provisional application No. 62/702,567, filed on Jul. 24, 2018.
(60) Provisional application No. 62/726,804, filed on Sep. 4, 2018.
(60) Provisional application No. 62/789,162, filed on Jan. 7, 2019.
(60) Provisional application No. 62/800,700, filed on Feb. 4, 2019.
(60) Provisional application No. 62/800,792, filed on Feb. 4, 2019.
(60) Provisional application No. 62/801,981, filed on Feb. 6, 2019.

(51) Int. Cl. A61K 39/00; A61K 39/39; C07K 14/47; A61K 31/4196; A61K 31/565; A61K 31/519; A61K 31/506; A61K 31/635; A61K 31/661; A61K 31/4025; A61K 31/473; A61K 31/52; A61K 31/4745; A61K 31/5377; A61K 31/453; A61K 31/498; A61K 31/343; A61K 31/585; A61K 31/58; A61P 35/00

(52) U.S. Cl. CPC A61K 39/001152; A61K 2039/55561; C07K 14/4748; A61K 31/4196; A61K 31/565; A61K 31/519; A61K 31/506; A61K 31/635; A61K 31/661; A61K 31/4025; A61K 31/473; A61K 31/52; A61K 31/4745; A61K 31/5377; A61K 31/453; A61K 31/498; A61K 31/343; A61K 31/585; A61K 31/58; A61P 35/00; A61K 39/39

(57) ABSTRACT

The disclosure herein relates to immunotherapeutic compositions comprising immunotherapeutic peptides comprising neoepitopes. Also disclosed herein are polynucleotides encoding the immunotherapeutic peptides. Also disclosed herein are methods of synthesis of immunotherapeutic peptides comprising neoepitopes and use of the immunotherapeutic compositions including methods of treatment.

### CROSS-REFERENCE

[0001] This application claims the benefit of U.S. Provisional Application No. 62/687,191, filed Jun. 19, 2018, U.S. Provisional Application No. 62/702,567, filed Jul. 24, 2018, U.S. Provisional Application No. 62/726,804, filed Sep. 4, 2018, U.S. Provisional Application No. 62/789,162, filed Jan. 7, 2019, U.S. Provisional Application No. 62/801,981, filed Feb. 6, 2019, U.S. Provisional Application No. 62/800,700, filed Feb. 4, 2019, and U.S. Provisional Application No. 62/800,792, filed Feb. 4, 2019, each of which application is incorporated herein by reference in their entirety.

### BACKGROUND

[0002] Cancer immunotherapy is the use of the immune system to treat cancer. Immunotherapies exploit the fact that cancer cells often have molecules on their surface that can be detected by the immune system, known as tumor antigens, which are often proteins or other macromolecules (e.g. carbohydrates). Active immunotherapy directs the immune system to attack tumor cells by targeting tumor antigens. Passive immunotherapies enhance existing anti-tumor responses and include the use of monoclonal antibodies, lymphocytes and cytokines. Tumor vaccines are typically composed of tumor antigens and immunostimulatory molecules (e.g., adjuvants, cytokines or TLR ligands) that work together to induce antigen-specific cytotoxic T cells (CTLs) that recognize and lyse tumor cells. One of the critical barriers to developing curative and tumor-specific immunotherapy is the identification and selection of highly specific and restricted tumor antigens to avoid autoimmunity.

[0003] Tumor neoantigens, which arise as a result of genetic change (e.g., inversions, translocations, deletions, missense mutations, splice site mutations, etc.) within malignant cells, represent the most tumor-specific class of antigens and can be patient-specific or shared. Tumor neoantigens are unique to the tumor cell as the mutation and its corresponding protein are present only in the tumor. They also avoid central tolerance and are therefore more likely to be immunogenic. Therefore, tumor neoantigens provide an excellent target for immune recognition including by both humoral and cellular immunity. However, tumor neoantigens have rarely been used in cancer vaccine or immunogenic compositions due to technical difficulties in identifying them, selecting optimized antigens, and producing neoantigens for use in a vaccine or immunogenic composition. Accordingly, there is still a need for developing additional cancer therapeutics.

### INCORPORATION BY REFERENCE

[0004] All publications, patents, and patent applications mentioned in this specification are herein incorporated by reference to the same extent as if each individual publication, patent, or patent application was specifically and individually indicated to be incorporated by reference.

### SUMMARY

[0005] In one aspect provided herein is a pharmaceutical composition comprising (a) at least one polypeptide or a pharmaceutically acceptable salt thereof comprising a first mutant GATA3 peptide sequence and a second mutant GATA3 peptide sequence, wherein (i) the first mutant GATA3 peptide sequence and the second mutant GATA3 peptide sequence each comprise at least 8 contiguous amino acids of SEQ ID NO: 1, and (ii) a C-terminal sequence of the first mutant GATA3 peptide sequence overlaps with an N-terminal sequence of the second mutant GATA3 peptide sequence; wherein the at least 8 contiguous amino acids of SEQ ID NO: 1 comprises at least one amino acid of sequence: PGRPLQTHVLPEPHLALQPLQPHADHAHADAPAIQPVLWTTPPLQHGHRHGLEPCSMLTGPPARVPA VPFDLHFCRSSIMKPKRDGYMFLKAESKIMFATLQRSSLWCLCSNH (SEQ ID NO: 2), or (b) at least one polynucleotide comprising a sequence encoding the at least one polypeptide.

[0006] In some embodiments, the first mutant GATA3 peptide sequence or the second mutant GATA3 peptide sequence comprises at least 8 contiguous amino acids of SEQ ID NO: 2. In some embodiments, the first mutant GATA3 peptide sequence and the second mutant peptide sequence comprises at least 8 contiguous amino acids of SEQ ID NO: 2.

[0007] In some embodiments, the at least 8 contiguous amino acids of SEQ ID NO: 2 comprises at least 8 contiguous amino acids of sequence:

(SEQ ID NO: 3)
PGRPLQTHVLPEPHLALQPLQPHADHAHADAPAIQPVLWTTPPLQHGHRH
GL.

[0008] In some embodiments, the at least 8 contiguous amino acids of SEQ ID NO: 2 comprises at least one amino acid of sequence:

(SEQ ID NO: 4)
EPCSMLTGPPARVPAVPFDLHFCRSSIMKPKRDGYMFLKAESKIMFATLQ
RSSLWCLCSNH.

[0009] In some embodiments, at least one of the first mutant GATA3 peptide sequence and the second mutant GATA3 peptide sequence comprise at least 14 mutant amino acids. In some embodiments, the at least one polypeptide comprises at least 3 mutant GATA3 peptide sequences. In some embodiments, the at least one polypeptide comprises at least two polypeptides. In some embodiments, the at least one polypeptide further comprises a third mutant GATA3 peptide sequence, wherein the third mutant GATA3 peptide sequence comprises at least 8 contiguous amino acids of SEQ ID NO: 1, wherein the at least 8 contiguous amino acids of SEQ ID NO: 1 comprises at least one amino acid of sequence SEQ ID NO: 2. In some embodiments, the third GATA3 mutant peptide comprises at least 8 contiguous amino acids of SEQ ID NO: 2.

[0010] In some embodiments, the at least one polypeptide comprises at least one mutant GATA3 peptide sequence that binds to or is predicted to bind to a protein encoded by an HLA-A02:01 allele, an HLA-A24:02 allele, an HLA-A03:01 allele, an HLA-B07:02 allele and/or an HLA-B08:01 allele. In some embodiments, the at least one polypeptide comprises at least one mutant GATA3 peptide sequence that binds to or is predicted to bind to a protein encoded by: (a) an HLA-A02:01 allele and an HLA-A24:02 allele, (b) an HLA-A02:01 allele and an HLA-B08:01 allele, (c) an HLA-A24:02 allele and an HLA-B08:01 allele, or (d) HLA-A02:01 allele, an HLA-A24:02 allele and an HLA-B08:01 allele. In some embodiments, (a) the first mutant GATA3 peptide sequence binds to or is predicted to bind to a protein encoded by an HLA-A02:01 allele, an HLA-A24:02 allele, an HLA-A03:01 allele, an HLA-B07:02 allele or an HLA-B08:01 allele; and (b) the second GATA3 peptide sequence binds to or is predicted to bind to a protein encoded by an HLA-A02:01 allele, an HLA-A24:02 allele, an HLA-A03:01 allele, an HLA-B07:02 allele or an HLA-B08:01 allele; wherein the first mutant GATA3 peptide sequence binds to or is predicted to bind to a protein encoded by different HLA allele than the second mutant GATA3 peptide sequence.

[0011] In some embodiments, at least one of the first mutant GATA3 peptide sequence and the second mutant GATA 3 peptide sequence binds to a protein encoded by an HLA allele with an affinity of less than 500 nM.

[0012] In some embodiments, at least one of the first mutant GATA3 peptide sequence and the second mutant peptide sequence binds to a protein encoded by an HLA allele with a stability of greater than 1 hour.

[0013] In some embodiments, the at least one polypeptide comprises at least one of the following sequences: (a) TLQRSSLWCL, VLPEPHLAL, HVLPEPHLAL, ALQPLQPHA, AIQPVLWTT, APAIQPVLWTT, SMLTGPPARV, MLTGPPARV, and/or YMFLKAESKI, and/or (b) MFLKAESKI and/or YMFLKAESKI, and/or (c) VLWTTPPLQH, YMFLKAESK and/or KIMFATLQR, and/or (d) FATLQRSSL, EPHLALQPL, QPVLWTTPPL, GPPARVPAV, MFATLQRSSL KPKRDGYMF and/or KPKRDGYMFL, and/or (e) IMKPKRDGYM, MFATLQRSSL, FLKAESKIMF, LHFCRSSIM, EPHLALQPL, FATLQRSSL, ESKIMFATL, FLKAESKIM and/or YMFLKAESKI.

[0014] In some embodiments, the at least one polypeptide comprises at least two of the following sequences: (a) TLQRSSLWCL, VLPEPHLAL, HVLPEPHLAL, ALQPLQPHA, AIQPVLWTT, APAIQPVLWTT, SMLTGPPARV, MLTGPPARV, and/or YMFLKAESKI, and/or (b) MFLKAESKI and/or YMFLKAESKI, and/or (c) VLWTTPPLQH, YMFLKAESK and/or KIMFATLQR, and/or (d) FATLQRSSL, EPHLALQPL, QPVLWTTPPL, GPPARVPAV, MFATLQRSSL KPKRDGYMF and/or KPKRDGYMFL, and/or (e) IMKPKRDGYM, MFATLQRSSL, FLKAESKIMF, LHFCRSSIM EPHLALQPL, FATLQRSSL, ESKIMFATL, FLKAESKIM and/or YMFLKAESKI.

[0015] In some embodiments, the mutant GATA3 peptide sequences comprise, (a) the first mutant GATA3 peptide sequence from (a) and the second mutant GATA3 peptide sequence from (b), (b) the first mutant GATA3 peptide sequence from (a) and the second mutant GATA3 peptide sequence from (c), (c) the first mutant GATA3 peptide sequence from (a) and the second mutant GATA3 peptide sequence from (d), (d) the first mutant GATA3 peptide sequence from (a) and the second mutant GATA3 peptide sequence from (e), (e) the first mutant GATA3 peptide sequence from (b) and the second mutant GATA3 peptide sequence from (c), (f) the first mutant GATA3 peptide sequence from (b) and the second mutant GATA3 peptide sequence from (d), (g) the first mutant GATA3 peptide sequence from (b) and the second mutant GATA3 peptide sequence from (e), (h) the first mutant GATA3 peptide sequence from (c) and the second mutant GATA3 peptide sequence from (d), (i) the first mutant GATA3 peptide sequence from (c) and the second mutant GATA3 peptide sequence from (e), or (j) the first mutant GATA3 peptide sequence from (d) and the second mutant GATA3 peptide sequence from (e).

[0016] In some embodiments, the first mutant GATA3 peptide sequences, and the second mutant GATA 3 peptide sequence comprises a peptide of Table 5 and/or Table 6. In some embodiments, the first mutant GATA3 peptide sequence comprises a first neoepitope of GATA3 protein and the second peptide mutant GATA3 peptide sequence comprises a second neoepitope of a mutant GATA protein, wherein the first mutant GATA3 peptide sequence is different from the second mutant GATA3 peptide sequence, and wherein the first neoepitope comprises at least one mutant amino acid and the second neoepitope comprises the same mutant amino acid.

[0017] In some embodiments, each of the first mutant GATA3 peptide sequence and the second mutant GATA3 peptide sequences comprising the at least eight contiguous amino acids are represented by a formula of: [Xaa]F-[Xaa]N-[Xaa]C or [Xaa]N-[Xaa]C-[Xaa]F, wherein each Xaa is an amino acid, wherein [Xaa]N and [Xaa]C each comprise an amino acid sequence encoded by a different portion of the GATA3 gene, wherein [Xaa]F is any amino acid sequence, wherein [Xaa]N is encoded in a non-wild type reading frame of the GATA3 gene, wherein [Xaa]C comprises the at least one mutant amino acid and is encoded in a non-wild type reading frame of the GATA3 gene, wherein N is an integer of from 0-100, wherein C is an integer of from 1-100, wherein F is an integer of from 0-100, wherein the sum of N and M is at least 8.

[0018] In some embodiments, each Xaa of [Xaa]F is a lysine residue and F is an integer of from 1-100, 1-10, 9, 8, 7, 6, 5, 4, 3, 2 or 1. In some embodiments, F is 3, 4 or 5.

[0019] In some embodiments, each of the mutant GATA3 peptide sequences are present at a concentration of at least 50 μg/mL-400 μg/mL. In some embodiments, the first mutant GATA3 peptide sequences and the second mutant GATA3 peptide sequence comprises a sequence of Table 1 or 2. In some embodiments, the composition further comprises an immunomodulatory agent or an adjuvant. In some embodiments, the adjuvant is polyICLC.

[0020] In one aspect, provided herein is a pharmaceutical composition comprising: one or more mutant GATA3 peptide sequence, the one or more mutant GATA3 peptide sequence comprises a sequence selected from group consisting of ESKIMFATLQRSSL, KPKRDGYMFLKAESKI, SMLTGPPARVPAVPFDLH, EPCSMLTGPPARVPAVPFDLH, LHFCRSSIMKPKRDGYMFLKAESKI, GPPARVPAVPFDLHFCRSSIMKPKRD, and KPKRDGYMFLKAESKIMFATLQRSSLWCLCSNH.

[0021] In some embodiments, the one or more mutant GATA3 peptide sequence is ESKIMFATLQRSSL. In some embodiments, the one or more mutant GATA3 peptide sequence is KPKRDGYMFLKAESKI. In some embodiments, the one or more mutant GATA3 peptide sequence is SMLTGPPARVPAVPFDLH. In some embodiments, the one or more mutant GATA3 peptide sequence is EPCSMLTGPPARVPAVPFDLH. In some embodiments, the one or more mutant GATA3 peptide sequence is LHFCRSSIMKPKRDGYMFLKAESKI. In some embodiments, the one or more mutant GATA3 peptide sequence is GPPARVPAVPFDLHFCRSSIMKPKRD. In some embodiments, the one or more mutant GATA3 peptide sequence is KPKRDGYMFLKAESKIMFATLQRSSLWCLCSNH.

[0022] In some embodiments, the pharmaceutical composition comprises a pH modifier present at a concentration of from 0.1 mM-1 mM. In some embodiments, the pharmaceutical composition comprises a pH modifier present at a concentration of from 1 mM-10 mM.

[0023] In one aspect provided herein is a method of synthesizing a GATA3 peptide, wherein the peptide comprises a sequence of at least two contiguous amino acids selected from the group consisting of Xaa-Cys, Xaa-Ser, and Xaa-Thr, wherein Xaa is any amino acid, the method comprising: (a) coupling at least one di-peptide or derivative thereof to an amino acid or derivative thereof of a GATA3 peptide or derivative thereof to obtain a pseudo-proline containing GATA3 peptide or derivative thereof, wherein the di-peptide or derivative thereof comprises a pseudo-proline moiety, (b) coupling one or more selected amino acids, small peptides or derivatives thereof to the pseudo-proline containing GATA3 peptide or derivative thereof, and (c) cleaving the pseudo-proline containing GATA3 peptide or derivative thereof from the resin. In some embodiments, the method comprises deprotecting the pseudo-proline containing GATA3 peptide or derivative thereof.

[0024] In some embodiments, the amino acid or derivative thereof to which at least one di-peptide or derivative thereof is coupled is selected from the group consisting of Ala, Cys, Asp, Glu, Phe, Gly, Ile, Lys, Leu, Met, Asn, Pro, Gln, Arg, Ser, Thr, Trp, Tyr, His, and Val. In some embodiments, the one or more selected amino acids, small peptides or derivatives thereof optionally coupled to the pseudo-proline containing GATA3 peptide or derivative thereof comprise Fmoc-Ala-OH.H2O, Fmoc-Cys(Trt)-OH, Fmoc-Asp(OtBu)-OH, Fmoc-Asp(OMpe)-OH, Fmoc-Glu(OtBu)-OH, Fmoc-Phe-OH, Fmoc-Gly-OH, Fmoc-Ile-OH, Fmoc-Lys(Boc)-OH, Fmoc-Leu-OH, Fmoc-Met-OH, Fmoc-Asn(Trt)-OH, Fmoc-Pro-OH, Fmoc-Gln(Trt)-OH, Fmoc-Arg(Pbf)-OH, Fmoc-Ser(tBu)-OH, Fmoc-Thr(tBu)-OH, Fmoc-Trp(Boc)-OH, Fmoc-Tyr(tBu)-OH, Fmoc-Val-OH, Fmoc-His(Trt)-OH and Fmoc-His(Boc)-OH.

[0025] In some embodiments, an N-terminal amino acid or derivative thereof of the GATA3 peptide or derivative thereof is selected from the group consisting of Fmoc-Ala-OH.H2O, Fmoc-Cys(Trt)-OH, Fmoc-Asp(OtBu)-OH, Fmoc-Asp(OMpe)-OH, Fmoc-Glu(OtBu)-OH, Fmoc-Phe-OH, Fmoc-Gly-OH, Fmoc-Ile-OH, Fmoc-Lys(Boc)-OH, Fmoc-Leu-OH, Fmoc-Met-OH, Fmoc-Asn(Trt)-OH, Fmoc-Pro-OH, Fmoc-Gln(Trt)-OH, Fmoc-Arg(Pbf)-OH, Fmoc-Ser(tBu)-OH, Fmoc-Thr(tBu)-OH, Fmoc-Trp(Boc)-OH, Fmoc-Tyr(tBu)-OH, Fmoc-Val-OH, Fmoc-His(Trt)-OH and Fmoc-His(Boc)-OH.

[0026] In some embodiments, the pseudo-proline moiety is (a) Fmoc-Ser(tBu)-Ser(psi(Me,Me)pro)-OH, (b) Fmoc-Ala-Thr(psi(Me,Me)pro)-OH, (c) Fmoc-Glu(OtBu)-Ser(psi(Me,Me)pro)-OH, (d) Fmoc-Leu-Thr(psi(Me,Me)pro)-OH, (e) Fmoc-Leu-Cys(psi(Dmp,H)pro)-OH. In some embodiments, (a) Xaa-Ser is Ser-Ser, (b) Xaa-Ser is Glu-Ser, (c) Xaa-Thr is Ala-Thr, (d) Xaa-Thr is Leu-Thr, or (e) Xaa-Cys is Leu-Cys.

[0027] In one aspect provided herein is a method of treating a subject with cancer comprising administering to the subject the pharmaceutical composition of any one of aspects described above.

[0028] In one aspect, provided herein is a method of identifying a subject with cancer as a candidate for a therapeutic, the method comprising identifying the subject as one that expresses a protein encoded by an HLA-A02:01 allele, an HLA-A24:02 allele, an HLA-A03:01 allele, an HLA-B07:02 allele and/or an HLA-B08:01 allele, wherein the therapeutic comprises (a) at least one polypeptide comprising one or more mutant GATA3 peptide sequences, wherein each of the one or more mutant GATA3 peptide sequences comprises at least one mutant amino acid and is fragment of at least 8 contiguous amino acids of a mutant GATA3 protein arising from a mutation in a GATA3 gene of a cancer cell; or (b) at least one polynucleotide comprising a sequence encoding the at least one polypeptide, wherein each of the one or more mutant GATA3 peptide sequences or a portion thereof binds to a protein encoded by an HLA-A02:01 allele, an HLA-A24:02 allele, an HLA-A03:01 allele, an HLA-B07:02 allele and/or an HLA-B08:01 allele. In some embodiments, the method further comprises administering the therapeutic to the subject.

[0029] In one aspect provided herein is a method of treating a subject with cancer comprising administering to the subject a pharmaceutical composition comprising: (a) at least one polypeptide comprising a first mutant GATA3 peptide sequence and a second mutant GATA3 peptide sequence, wherein (i) the first mutant GATA3 peptide sequence and the second mutant GATA3 peptide sequence each comprise at least 8 contiguous amino acids of SEQ ID NO: 1, and (ii) a C-terminal sequence of the first mutant GATA3 peptide sequence overlaps with an N-terminal sequence of the second mutant GATA3 peptide sequence; wherein the at least 8 contiguous amino acids of SEQ ID NO: 1 comprises at least one amino acid of sequence PGRPLQTHVLPEPHLALQPLQPHADHAHADAPAIQPVLWTTPPLQHGHRHGLEPCSMLTGPPARVPA VPFDLHFCRSSIMKPKRDGYMFLKAESKIMFAT LQRSSLWCLCSNH (SEQ ID NO: 2), or (b) at least one polynucleotide comprising a sequence encoding the at least one polypeptide, wherein HLA alleles expressed by subject are unknown at the time of administering.

[0030] In some embodiments, the at least 8 contiguous amino acid of SEQ ID NO: 1 comprises at least one amino acid of sequence:

(SEQ ID NO: 2)
PGRPLQTHVLPEPHLALQPLQPHADHAHADAPAIQPVLWTTPPLQHGHRH
GLEPCSMLTGPPARVPAVPFDLHFCRSSIMKPKRDGYMFLKAESKIMFAT
LQRSSLWCLCSNH.

[0031] In some embodiments, the cancer is selected from the group consisting of melanoma, ovarian cancer, lung cancer, prostate cancer, breast cancer, colorectal cancer, endometrial cancer, and chronic lymphocytic leukemia (CLL). In some embodiments, the subject has a breast cancer that is resistant to anti-estrogen therapy, is an MSI breast cancer, is a metastatic breast cancer, is a Her2 negative breast cancer, is a Her2 positive breast cancer, is an ER negative breast cancer, is an ER positive breast cancer, is a PR positive breast cancer, is a PR negetive breast cancer or any combination thereof.

[0032] In some embodiments, the breast cancer expresses an estrogen receptor with a mutation. In some embodiments, the method of aspects described above further comprises administering at least one additional therapeutic agent or modality. In some embodiments, the at least one additional therapeutic agent or modality is surgery, a checkpoint inhibitor, an antibody or fragment thereof, a chemotherapeutic agent, radiation, a vaccine, a small molecule, a T cell, a vector, and APC, a polynucleotide, an oncolytic virus or any combination thereof. In some embodiments, the at least one additional therapeutic agent is an anti-PD-1 agent and anti-PD-L1 agent, an anti-CTLA-4 agent, an anti-CD40 agent, letrozole, fulvestrant, a PI3 kinase inhibitor and/or a CDK 4/6 inhibitor. In some embodiments, the at least one additional therapeutic agent is palbociclib, ribociclib, abemaciclib, seliciclib, dinaciclib, milciclib, roniciclib, atuveciclib, briciclib, riviciclib, seliciclib, trilaciclib, voruciclib or any combination thereof.

[0033] In some embodiments, the at least one additional therapeutic agent is palbociclib (PD0332991); abemaciclib (LY2835219); ribociclib (LEE 011); voruciclib (P1446A-05); fascaplysin; arcyriaflavin; 2-bromo-12,13-dihydro-5H-indolo[2,3-a]pyrrolo[3,4-c]carbazole-5,7(6H)-dione; 3-amino thioacridone (3-ATA), trans-4-((6-(ethylamino)-2-((1-(phenylmethyl)-1H-indol-5-yl)amino)-4-pyrimidinyl)amino)-cyclohexano (CINK4); 1,4-dimethoxyacridine-9(10H)-thione (NSC 625987); 2-methyl-5-(p-tolylamino)benzo[d]thiazole-4,7-dione (ryuvidine); flavopiridol (alvocidib); seliciclib; dinaciclib; milciclib; roniciclib; atuveciclib; briciclib; riviciclib; trilaciclib (G1T28); or any combination thereof.

[0034] In some embodiments, the at least one additional therapeutic agent is Wortmannin, Demethoxyviridin, LY294002, hibiscone C, Idelalisib, Copanlisib, Duvelisib, Taselisib, Perifosine, Buparlisib, Duvelisib, Alpelisib (BYL719), Umbralisib, (TGR 1202), Copanlisib (BAY 80-6946), PX-866, Dactolisib, CUDC-907, Voxtalisib (SAR245409, XL765), CUDC-907, ME-401, IPI-549, SF1126, RP6530, INK1117, pictilisib (GDC-0941), XL147 (SAR245408), Palomid 529, GSK1059615, ZSTK474, PWT33597, IC87114, TG100-115, CAL263, RP6503, PI-103, GNE-477 or AEZS-136.

[0035] In some embodiments, the cancer is recurrent or metastatic breast cancer. In some embodiments, the subject is a subject that has had disease progression following endocrine therapy in combination with a CDK 4/6 inhibitor; or wherein the subject has not received prior systemic therapy. In some embodiments, the method comprises determining a mutation status of an estrogen receptor gene of cells of the subject. In some embodiments, the cells are isolated cells or cells enriched for expression of estrogen receptor.

[0036] In aspects, provided herein is a composition comprising at least one polypeptide comprising one or more mutant GATA3 peptide sequences, wherein each of the one or more mutant GATA3 peptide sequences comprises at least one mutant amino acid, and is a fragment of at least 8 contiguous amino acids of a mutant GATA3 protein arising from a mutation in a GATA3 gene of a cancer cell; at least one polynucleotide comprising a sequence encoding the at least one polypeptide; one or more APCs comprising the at least one polypeptide; or a T cell receptor (TCR) specific for an neoepitope of the at least one polypeptide in complex with an HLA protein.

[0037] In some embodiments, the one or more mutant GATA3 peptide sequences comprises two or more mutant GATA3 peptide sequences. In some embodiments, each of the one or more mutant GATA3 peptide sequence comprises at least 8 contiguous amino acids of SEQ ID NO: 1 or 2.

[0038] In aspects, provided herein is a composition comprising at least one polypeptide comprising two or more mutant GATA3 peptide sequences, wherein each of the two or more mutant GATA3 peptide sequences comprise at least 8 contiguous amino acids of SEQ ID NO: 1, and a C-terminal sequence of a first GATA3 peptide sequence overlaps with an N-terminal sequence of a second GATA3 peptide sequence; at least one polynucleotide comprising a sequence encoding the at least one polypeptide one or more APCs comprising the at least one polypeptide; or a T cell receptor (TCR) specific for an neoepitope of the at least one polypeptide in complex with an HLA protein.

[0039] In some embodiments, the mutant GATA3 peptide sequences comprise a fragment of a mutant GATA3 protein arising from a frameshift mutation in a GATA3 gene of a cancer cell. In some embodiments, the at least 8 contiguous amino acids comprise at least one amino acid encoded by a GATA3 neoORF sequence. In some embodiments, the mutation in a GATA3 gene of a cancer cell is a frameshift mutation. In some embodiments, the mutation in a GATA3 gene of a cancer cell is a missense mutation, a splice site mutation, or a gene fusion mutation. In some embodiments, each of the mutant GATA3 peptide sequences comprise at least 9, 10, 11, 12, 13, 14, 15, 16, 17, 18, 19, 20, 21, 22, 23, 24, 25, 26, 27, 28, 29, 30, 31, 32, 33, 34, 35, 36, 37, 38, 39, or 40 mutant amino acids.

[0040] In some embodiments, the at least one polypeptide comprises at least 3, 4, 5, 6, 7, 8, 9, or 10 mutant GATA3 peptide sequences. In some embodiments, the at least one polypeptide comprises at least two polypeptides, or the at least one polynucleotide comprises at least two polynucleotides. In some embodiments, at least one of the one or more GATA3 peptide sequences or at least one of the two or more GATA3 peptide sequences comprises at least 9, 10, 11, 12, 13, 14, 15, 16, 17, 18, 19, 20, 21, 22, 23, 24, 25, 26, 27, 28, 29, 30, 31, 32, 33, 34, 35, 36, 37, 38, 39, or 40 contiguous amino acids of a GATA3 protein. In some embodiments, at least two of the GATA3 peptide sequences comprise at least 9, 10, 11, 12, 13, 14, 15, 16, 17, 18, 19, 20, 21, 22, 23, 24, 25, 26, 27, 28, 29, 30, 31, 32, 33, 34, 35, 36, 37, 38, 39, or 40 contiguous amino acids of a GATA3 protein.

[0041] In some embodiments, each of the GATA3 peptide sequences comprise at least 9, 10, 11, 12, 13, 14, 15, 16, 17, 18, 19, 20, 21, 22, 23, 24, 25, 26, 27, 28, 29, 30, 31, 32, 33, 34, 35, 36, 37, 38, 39, or 40 contiguous amino acids of a GATA3 protein. In some embodiments, at least one of the two or more mutant GATA3 peptide sequence comprises at least 8 contiguous amino acids of SEQ ID NO: 2. In some embodiments, at least 3, 4, 5, 6, 7, 8, 9, or 10 of the two or more mutant GATA3 peptide sequence comprises at least 8 contiguous amino acids of SEQ ID NO: 2. In some embodiments, each of one of the two or more mutant GATA3 peptide sequence comprises at least 8 contiguous amino acids of SEQ ID NO: 2. In some embodiments, at least one of the two or more mutant GATA3 peptide sequence comprises at least 8 contiguous amino acids of SEQ ID NO: 3.

[0042] In some embodiments, at least one of the at least 8 contiguous amino acids is an amino acid of SEQ ID NO: 4. In some embodiments, a contiguous amino acid of the at least 8 contiguous amino acids is not an amino acid of SEQ ID NO: 4. In some embodiments, the at least one polypeptide comprises at least one mutant GATA3 peptide sequence that binds to or is predicted to bind to a protein encoded by an HLA-A02:01 allele, an HLA-A24:02 allele, an HLA-A03:01 allele, an HLA-B07:02 allele and/or an HLA-B08:01 allele. In some embodiments, the at least one polypeptide comprises at least one mutant GATA3 peptide sequence that binds to or is predicted to bind to a protein encoded by: an HLA-A02:01 allele and an HLA-A24:02 allele; an HLA-A02:01 allele and an HLA-B08:01 allele; an HLA-A24:02 allele and an HLA-B08:01 allele; or an HLA-A02:01 allele, an HLA-A24:02 allele and an HLA-B08:01 allele.

[0043] In some embodiments, the two or more mutant GATA3 peptide sequences comprise a first mutant GATA3 peptide sequence that binds to or is predicted to bind to a protein encoded by an HLA-A02:01 allele, an HLA-A24:02 allele, an HLA-A03:01 allele, an HLA-B07:02 allele or an HLA-B08:01 allele; and a second GATA3 peptide sequence that binds to or is predicted to bind to a protein encoded by an HLA-A02:01 allele, an HLA-A24:02 allele, an HLA-A03:01 allele, an HLA-B07:02 allele or an HLA-B08:01 allele; wherein the first mutant GATA3 peptide sequence binds to or is predicted to bind to a protein encoded by different HLA allele than the second mutant GATA3 peptide sequence.

[0044] In some embodiments, the at least one polypeptide comprises at least one mutant GATA3 peptide sequence that binds to a protein encoded by an HLA allele with an affinity of less than 10 μM, less than 1 μM, less than 500 nM, less than 400 nM, less than 300 nM, less than 250 nM, less than 200 nM, less than 150 nM, less than 100 nM, or less than 50 nM. In some embodiments, the at least one polypeptide comprises at least one mutant GATA3 peptide sequence that binds to a protein encoded by an HLA allele with a stability of greater than 24 hours, greater than 12 hours, greater than 9 hours, greater than 6 hours, greater than 5 hours, greater than 4 hours, greater than 3 hours, greater than 2 hours, greater than 1 hour, greater than 45 minutes, greater than 30 minutes, greater than 15 minutes, or greater than 10 minutes. In some embodiments, the HLA allele is selected from the group consisting of HLA-A02:01, HLA-A24:02, HLA-A03:01, HLA-B07:02, HLA-B08:01 and any combination thereof.

[0045] In some embodiments, the at least one polypeptide comprises at least one of the following sequences: TLQRSSLWCL, VLPEPHLAL, HVLPEPHLAL, ALQPLQPHA, AIQPVLWTT, APAIQPVLWTT, SMLTGPPARV, MLTGPPARV, and/or YMFLKAESKI; and/or MFLKAESKI and/or YMFLKAESKI VLWTTPPLQH, YMFLKAESK and/or KIMFATLQR; and/or FATLQRSSL, EPHLALQPL, QPVLWTTPPL, GPPARVPAV, MFATLQRSSL KPKRDGYMF and/or KPKRDGYMFL and/or IMKPKRDGYM, MFATLQRSSL, FLKAESKIMF, LHFCRSSIM, EPHLALQPL, FATLQRSSL, ESKIMFATL, FLKAESKIM and/or YMFLKAESKI.

[0046] In some embodiments, the two or more mutant GATA3 peptide sequences comprise at least two of the following sequences: TLQRSSLWCL, VLPEPHLAL, HVLPEPHLAL, ALQPLQPHA, AIQPVLWTT, APAIQPVLWTT, SMLTGPPARV, MLTGPPARV, and/or YMFLKAESKI; and/or MFLKAESKI and/or YMFLKAESKI VLWTTPPLQH, YMFLKAESK and/or KIMFATLQR; and/or FATLQRSSL, EPHLALQPL, QPVLWTTPPL, GPPARVPAV, MFATLQRSSL KPKRDGYMF and/or KPKRDGYMFL and/or IMKPKRDGYM, MFATLQRSSL, FLKAESKIMF, LHFCRSSIM EPHLALQPL, FATLQRSSL, ESKIMFATL, FLKAESKIM and/or YMFLKAESKI.

[0047] In some embodiments, the mutant GATA3 peptide sequences comprise at least two of the following sequences EPCSMLTGPPARVPAVPFDLH, SMLTGPPARVPAVPFDLH, GPPARVPAVPFDLHFCRSSIMKPKRD, DLHFCRSSIMKPKRDGYMFLKAESKI, KPKRDGYMFLKAESKIMFATLQRSSLWCLCSNH, FLKAESKIMFATLQRS, and KPKRDGYMFLKAESKI.

[0048] In some embodiments, the mutant GATA3 peptide sequences comprise at least two sequences of Table 5 and/or Table 6. In some embodiments, a first mutant GATA3 peptide sequence of the two or more mutant GATA3 peptide sequence comprises a first neoepitope of GATA3 protein and a second peptide mutant GATA3 peptide sequence comprises a second neoepitope of a mutant GATA protein, wherein the first mutant GATA3 peptide sequence is different from the mutant GATA3 peptide sequence, and wherein the first neoepitope comprises at least one mutant amino acid and the second neoepitope comprises the same mutant amino acid.

[0049] In aspects, provided herein is a composition comprising at least one polypeptide comprising one or more mutant GATA3 peptide sequences, wherein the at least one polypeptide is represented by a formula of

[0050] [Xaa]F-[Xaa]N-[Xaa]C, wherein each Xaa is independently any amino acid, wherein [Xaa]N-[Xaa]C represents the one or more mutant GATA3 peptide sequences, wherein [Xaa]N and [Xaa]C each comprise a contiguous amino acid sequence encoded by a different portion of the GATA3 gene, wherein [Xaa]N is encoded in a non-wild type reading frame, wherein [Xaa]C comprises the at least one mutant amino acid and is encoded in a non-wild type reading frame, wherein N is an integer of from 0-100, wherein C is an integer of from 1-100, wherein F is an integer of from 0-100, wherein the sum of N and M is at least 8.

[0051] In some embodiments, each of the mutant GATA3 peptide sequences the at least eight contiguous amino acids are represented by a formula of [Xaa]F-[Xaa]N-[Xaa]C or [Xaa]N-[Xaa]C-[Xaa]F, wherein each Xaa is an amino acid, wherein [Xaa]N and [Xaa]C each comprise an amino acid sequence encoded by a different portion of the GATA3 gene, wherein [Xaa]F is any amino acid sequence, wherein [Xaa]N is encoded in a non-wild type reading frame of the GATA3 gene, wherein [Xaa]C comprises the at least one mutant amino acid and is encoded in a non-wild type reading frame of the GATA3 gene, wherein N is an integer of from 0-100, wherein C is an integer of from 1-100, wherein F is an integer of from 0-100, wherein the sum of N and M is at least 8. In some embodiments, each Xaa of [Xaa]F is a lysine residue and F is an integer of from 1-100, 1-10, 9, 8, 7, 6, 5, 4, 3, 2 or 1. In some embodiments, F is 3, 4 or 5.

[0052] In some embodiments, the at least one mutant amino acid comprises at least 9, 10, 11, 12, 13, 14, 15, 16, 17, 18, 19, 20, 21, 22, 23, 24, 25, 26, 27, 28, 29, 30, 31, 32, 33, 34, 35, 36, 37, 38, 39, or 40 contiguous mutant amino acids. In some embodiments, each of the mutant GATA3 peptide sequences are present at a concentration at least 1 μg/mL, at least 10 μg/mL, at least 25 μg/mL, at least 50 μg/mL, at least 100 μg/mL, at least 200 μg/mL, at least 250 μg/mL, at least 300 μg/mL or at least 400 μg/mL. In some embodiments, each of the mutant GATA3 peptide sequences are present at a concentration at most 5000 μg/mL, at most 2500 μg/mL, at most 1000 μg/mL, at most 750 μg/mL, at most 500 μg/mL, at most 400 μg/mL, or at most 300 μg/mL. In some embodiments, each of the mutant GATA3 peptide sequences are present at a concentration of from 10 g/mL to 5000 μg/mL, 10 μg/mL to 4000 μg/mL, 10 μg/mL to 3000 μg/mL, 10 μg/mL to 2000 μg/mL, 10 g/mL to 1000 μg/mL, 25 μg/mL to 500 μg/mL, 50 μg/mL to 500 μg/mL, 100 μg/mL to 500 μg/mL, 200 g/mL to 500 μg/mL, 200 μg/mL to 400 μg/mL or 3000 μg/mL to 400 μg/mL.

[0053] In some embodiments, the composition further comprising an immunomodulatory agent or an adjuvant. In some embodiments, the adjuvant is polyICLC. In aspects, provided herein is a pharmaceutical composition comprising a composition described herein, and a pharmaceutically acceptable excipient. In some embodiments, the pharmaceutical composition comprises a pH modifier present at a concentration of less than 1 mM or greater than 1 mM. In some embodiments, the pharmaceutical composition is a vaccine composition. In some embodiments, the pharmaceutical composition is aqueous.

[0054] In some embodiments, one or more of the at least one polypeptide is bounded by pI>5 and HYDRO>−6, pI>8 and HYDRO>−8, pI<5 and HYDRO>−5, pI>9 and HYDRO<−8, pI>7 and a HYDRO value of >−5.5, pI<4.3 and −4≥HYDRO≥−8, pI>0 and HYDRO<−8, pI>0 and HYDRO>−4, or pI>4.3 and −4≥HYDRO≥−8, pI>0 and HYDRO>−4, or pI>4.3 and HYDRO≤−4, pI>0 and HYDRO>−4, or pI>4.3 and −4≥HYDRO≥−9, 5≥pI≥12 and −4≥HYDRO≥−9.

[0055] In some embodiments, the pH modifier is a base. In some embodiments, the pH modifier is a conjugate base of a weak acid. In some embodiments, the pH modifier is a pharmaceutically acceptable salt. In some embodiments, the pH modifier is a dicarboxylate or tricarboxylate salt. In some embodiments, the pH modifier is citric acid and/or a citrate salt. In some embodiments, the citrate salt is disodium citrate and/or trisodium citrate. In some embodiments, the pH modifier is succinic acid and/or a succinate salt. In some embodiments, the succinate salt is a disodium succinate and/or a monosodium succinate. In some embodiments, the succinate salt is disodium succinate hexahydrate. In some embodiments, the pH modifier is present at a concentration of from 0.1 mM-10 mM. In some embodiments, the pH modifier is present at a concentration of from 0.1 mM-5 mM. In some embodiments, the pH modifier is present at a concentration of from 0.1 mM-1 mM. In some embodiments, the pH modifier is present at a concentration of from 1 mM-10 mM. In some embodiments, the pH modifier is present at a concentration of from 1 mM-5 mM.

[0056] In some embodiments, the pharmaceutically acceptable carrier comprises a liquid. In some embodiments, the pharmaceutically acceptable carrier comprises water. In some embodiments, the pharmaceutically acceptable carrier comprises a sugar. In some embodiments, the sugar comprises dextrose or mannitol. In some embodiments, the dextrose or mannitol is present at a concentration of from 1-10% w/v. In some embodiments, the sugar comprises trehalose. In some embodiments, the sugar comprises sucrose. In some embodiments, the pharmaceutically acceptable carrier comprises dimethyl sulfoxide (DMSO).

[0057] In some embodiments, the DMSO is present at a concentration from 0.1% to 10%, 0.5% to 5%, 1% to 5%, 2% to 5%, 2% to 4%, or 2% to 4%. In some embodiments, the pharmaceutically acceptable carrier does not comprise dimethyl sulfoxide (DMSO). In some embodiments, the pharmaceutical composition is lyophilizable. In some embodiments, the pharmaceutical composition further comprises an immunomodulator or adjuvant. In some embodiments, the immunomodulator or adjuvant is selected from the group consisting of poly-ICLC, 1018 ISS, aluminum salts, Amplivax, AS15, BCG, CP-870,893, CpG7909, CyaA, ARNAX, STING agonists, dSLIM, GM-CSF, IC30, IC31, Imiquimod, ImuFact IMP321, IS Patch, ISS, ISCOMATRIX, JuvImmune, LipoVac, MF59, monophosphoryllipid A, Montanide IMS 1312, Montanide ISA 206, Montanide ISA 50V, Montanide ISA-51, OK-432, OM-174, OM-197-MP-EC, ONTAK, PepTel®, vector system, PLGA microparticles, resiquimod, SRL172, Virosomes and other Virus-like particles, YF-17D, VEGF trap, R848, beta-glucan, Pam3Cys, and Aquila's QS21 stimulon.

[0058] In some embodiments, the immunomodulator or adjuvant comprises poly-ICLC. In some embodiments, a ratio of poly-ICLC to peptides in the pharmaceutical composition is from 2:1 to 1:10 v:v. In some embodiments, the ratio of poly-ICLC to peptides in the pharmaceutical composition is about 1:1, 1:1.5, 1:2, 1:3, 1:4 or 1:5 v:v. In some embodiments, the ratio of poly-ICLC to peptides in the pharmaceutical composition is about 1:3 v:v.

[0059] In aspects, provided herein is a method of synthesizing a GATA3 peptide, wherein the peptide comprises a sequence of at least two contiguous amino acids selected from the group consisting of Xaa-Cys, Xaa-Ser, and Xaa-Thr, wherein Xaa is any amino acid, the method comprising: coupling at least one di-peptide or derivative thereof to an amino acid or derivative thereof of a GATA3 peptide or derivative thereof to obtain a pseudo-proline containing GATA3 peptide or derivative thereof, wherein the di-peptide or derivative thereof comprises a pseudo-proline moiety; coupling one or more selected amino acids, small peptides or derivatives thereof to the pseudo-proline containing GATA3 peptide or derivative thereof, and cleaving the pseudo-proline containing GATA3 peptide or derivative thereof from the resin.

[0060] In some embodiments, the method comprises deprotecting the pseudo-proline containing GATA3 peptide or derivative thereof. In some embodiments, the GATA3 peptide is a peptide of the at least one polypeptide of a composition described herein or of the pharmaceutical composition herein. In some embodiments, an N-terminal amino acid or derivative thereof of the GATA3 peptide or derivative thereof is attached to a resin. In some embodiments, the resin is a Wang resin or a 2-chlorotrityl resin (2-Cl-Trt resin). In some embodiments, a starting material for the coupling is Fmoc-His(Trt)-Wang resin, H-His(Trt)-2Cl-Trt resin, Fmoc-Asp(OtBu)-Wang resin, Fmoc-Ile-Wang resin, Fmoc-Ser(tBu)-Wang resin, or Fmoc-Leu-Wang resin. In some embodiments, the amino acid or derivative thereof to which at least one di-peptide or derivative thereof is coupled is selected from the group consisting of Ala, Cys, Asp, Glu, Phe, Gly, Ile, Lys, Leu, Met, Asn, Pro, Gln, Arg, Ser, Thr, Trp, Tyr, His, and Val.

[0061] In some embodiments, the one or more selected amino acids, small peptides or derivatives thereof optionally coupled to the pseudo-proline containing GATA3 peptide or derivative thereof comprise Fmoc-Ala-OH.H2O, Fmoc-Cys(Trt)-OH, Fmoc-Asp(OtBu)-OH, Fmoc-Asp(OMpe)-OH, Fmoc-Glu(OtBu)-OH, Fmoc-Phe-OH, Fmoc-Gly-OH, Fmoc-Ile-OH, Fmoc-Lys(Boc)-OH, Fmoc-Leu-OH, Fmoc-Met-OH, Fmoc-Asn(Trt)-OH, Fmoc-Pro-OH, Fmoc-Gln(Trt)-OH, Fmoc-Arg(Pbf)-OH, Fmoc-Ser(tBu)-OH, Fmoc-Thr(tBu)-OH, Fmoc-Trp(Boc)-OH, Fmoc-Tyr(tBu)-OH, Fmoc-Val-OH, Fmoc-His(Trt)-OH and Fmoc-His(Boc)-OH.

[0062] In some embodiments, an N-terminal amino acid or derivative thereof of the GATA3 peptide or derivative thereof is selected from the group consisting of Fmoc-Ala-OH.H2O, Fmoc-Cys(Trt)-OH, Fmoc-Asp(OtBu)-OH, Fmoc-Asp(OMpe)-OH, Fmoc-Glu(OtBu)-OH, Fmoc-Phe-OH, Fmoc-Gly-OH, Fmoc-Ile-OH, Fmoc-Lys(Boc)-OH, Fmoc-Leu-OH, Fmoc-Met-OH, Fmoc-Asn(Trt)-OH, Fmoc-Pro-OH, Fmoc-Gln(Trt)-OH, Fmoc-Arg(Pbf)-OH, Fmoc-Ser(tBu)-OH, Fmoc-Thr(tBu)-OH, Fmoc-Trp(Boc)-OH, Fmoc-Tyr(tBu)-OH, Fmoc-Val-OH, Fmoc-His(Trt)-OH and Fmoc-His(Boc)-OH.

[0063] In some embodiments, the pseudo-proline moiety is Fmoc-Ser(tBu)-Ser(psi(Me,Me)pro)-OH. In some embodiments, the pseudo-proline moiety is Fmoc-Ala-Thr(psi(Me,Me)pro)-OH. In some embodiments, the pseudo-proline moiety is Fmoc-Glu(OtBu)-Ser(psi(Me,Me)pro)-OH. In some embodiments, the pseudo-proline moiety is Fmoc-Leu-Thr(psi(Me,Me)pro)-OH. In some embodiments, the pseudo-proline moiety is Fmoc-Leu-Cys(psi(Dmp,H)pro)-OH.

[0064] In some embodiments, Xaa-Ser is Ser-Ser. In some embodiments, Xaa-Ser is Glu-Ser. In some embodiments, Xaa-Thr is Ala-Thr. In some embodiments, Xaa-Thr is Leu-Thr. In some embodiments, Xaa-Cys is Leu-Cys.

[0065] In aspects, provided herein is a method of treating a subject with cancer comprising administering to the subject a pharmaceutical composition described herein.

[0066] In aspects, provided herein is a method of identifying a subject with cancer as a candidate for a therapeutic, the method comprising identifying the subject as one that expresses a protein encoded by an HLA-A02:01 allele, an HLA-A24:02 allele, an HLA-A03:01 allele, an HLA-B07:02 allele and/or an HLA-B08:01 allele, wherein the therapeutic comprises at least one polypeptide comprising one or more mutant GATA3 peptide sequences, wherein each of the one or more mutant GATA3 peptide sequences comprises at least one mutant amino acid and is fragment of at least 8 contiguous amino acids of a mutant GATA3 protein arising from a mutation in a GATA3 gene of a cancer cell; at least one polynucleotide comprising a sequence encoding the at least one polypeptide; one or more APCs comprising the at least one polypeptide; or a T cell receptor (TCR) specific for an neoepitope of the at least one polypeptide in complex with an HLA protein; wherein each of the one or more mutant GATA3 peptide sequences or a portion thereof binds to a protein encoded by an HLA-A02:01 allele, an HLA-A24:02 allele, an HLA-A03:01 allele, an HLA-B07:02 allele and/or an HLA-B08:01 allele. In some embodiments, the method further comprises administering the therapeutic to the subject.

[0067] In aspects, provided herein is a method of treating a subject with cancer comprising administering to the subject a composition comprising: at least one polypeptide comprising one or more mutant GATA3 peptide sequences, wherein each of the one or more mutant GATA3 peptide sequences comprises at least one mutant amino acid and is fragment of at least 8 contiguous amino acids of a mutant GATA3 protein arising from a mutation in a GATA3 gene of a cancer cell; at least one polynucleotide comprising a sequence encoding the at least one polypeptide; one or more APCs comprising the at least one polypeptide; or a T cell receptor (TCR) specific for an neoepitope of the at least one polypeptide in complex with an HLA protein; wherein the mutant GATA3 peptide or as portion thereof binds to a protein encoded by an HLA-A02:01 allele, an HLA-A24:02 allele, an HLA-A03:01 allele, an HLA-B07:02 allele and/or an HLA-B08:01 allele; wherein the subject is identified as expressing an HLA-A02:01 allele, an HLA-A24:02 allele, an HLA-A03:01 allele, an HLA-B07:02 allele and/or an HLA-B08:01 allele.

[0068] In aspects, provided herein is a method of treating a subject with cancer comprising administering to the subject a composition comprising at least one polypeptide comprising two or more mutant GATA3 peptide sequences, wherein each of the two or more mutant GATA3 peptide sequence comprises at least 8 contiguous amino acids of SEQ ID NO: 1, and a C-terminal sequence of a first GATA3 peptide sequence overlaps with an N-terminal sequence of a second GATA3 peptide sequence; at least one polynucleotide comprising a sequence encoding the at least one polypeptide; one or more APCs comprising the at least one polypeptide; or a T cell receptor (TCR) specific for an neoepitope of the at least one polypeptide in complex with an HLA protein; wherein HLA alleles expressed by subject are unknown at the time of administering.

[0069] In some embodiments, an immune response is elicited in the subject. In some embodiments, the immune response is a humoral response. In some embodiments, the mutant GATA3 peptide sequences are administered simultaneously, separately or sequentially. In some embodiments, the first peptide is sequentially administered after a time period sufficient for the second peptide to activate the second T cells. In some embodiments, the cancer is selected from the group consisting of melanoma, ovarian cancer, lung cancer, prostate cancer, breast cancer, colorectal cancer, endometrial cancer, and chronic lymphocytic leukemia (CLL). In some embodiments, the subject has a breast cancer that is resistant to anti-estrogen therapy, is an MSI breast cancer, is a metastatic breast cancer, is a Her2 negative breast cancer, is a Her2 positive breast cancer, is an ER negative breast cancer, is an ER positive breast cancer, is a PR positive breast cancer, is a PR negetive breast cancer or any combination thereof. In some embodiments, the breast cancer expresses an estrogen receptor with a mutation. In some embodiments, the method further comprises administering at least one additional therapeutic agent or modality.

[0070] In some embodiments, the at least one additional therapeutic agent or modality is surgery, a checkpoint inhibitor, an antibody or fragment thereof, a chemotherapeutic agent, radiation, a vaccine, a small molecule, a T cell, a vector, and APC, a polynucleotide, an oncolytic virus or any combination thereof. In some embodiments, the at least one additional therapeutic agent is an anti-PD-1 agent and anti-PD-L1 agent, an anti-CTLA-4 agent, an anti-CD40 agent, letrozole, fulvestrant, and/or a CDK 4/6 inhibitor. In some embodiments, the at least one additional therapeutic agent is selected from the group consisting of palbociclib (PD0332991); abemaciclib (LY2835219); ribociclib (LEE 011); voruciclib (P1446A-05); fascaplysin; arcyriaflavin; 2-bromo-12,13-dihydro-5H-indolo[2,3-a]pyrrolo[3,4-c]carbazole-5,7(6H)-dione; 3-amino thioacridone (3-ATA), trans-4-((6-(ethylamino)-2-((1-(phenylmethyl)-1H-indol-5-yl)amino)-4-pyrimidinyl)amino)-cyclohexano (CINK4); 1,4-dimethoxyacridine-9(10H)-thione (NSC 625987); 2-methyl-5-(p-tolylamino)benzo[d]thiazole-4,7-dione (ryuvidine); and flavopiridol (alvocidib); seliciclib; dinaciclib; milciclib; roniciclib; atuveciclib; briciclib; riviciclib; trilaciclib (G1T28); and any combination thereof.

[0071] In some embodiments, the additional therapeutic agent is administered before, simultaneously, or after administering the mutant GATA3 peptide sequences. In some embodiments, administering comprises administering subcutaneously or intravenously. In some embodiments, the cancer is recurrent or metastatic breast cancer. In some embodiments, the subject is a subject that has had disease progression following endocrine therapy in combination with a CDK 4/6 inhibitor.

[0072] A mutation common for CLL and certain lymphomas is a Cysteine to Serine change at position 481 (C481S) in the BTK (Bruton's Tyrosine Kinase) gene. The mutation is harbored in a region having the amino acid sequence: IFIITEYMANGSLLNYLREMRHR, the mutated Serine is underlined. This change produces a number of binding peptides which bind to a range of HLA molecules.

[0073] In one aspect, provided herein is a composition comprising a polypeptide, comprising one or more mutant BTK peptide sequences from a C481S mutant BTK protein, the one or more mutant BTK peptide sequences comprising at least 8 contiguous amino acids of the mutant BTK protein, wherein the amino acid sequences of the peptides are: ANGSLLNY; ANGSLLNYL; ANGSLLNYLR; EYMANGSL; EYMANGSLLN; EYMANGSLLNY; GSLLNYLR; GSLLNYLREM; ITEYMANGS; ITEYMANGSL; ITEYMANGSLL; MANGSLLNYL; MANGSLLNYLR; NGSLLNYL; NGSLLNYL; SLLNYLREMR; TEYMANGSLL; TEYMANGSLLNY; YMANGSLL; or YMANGSLLN, listed in Table 34.

[0074] In some embodiments, the one or more mutant BTK peptide sequences comprise: (a) ANGSLLNY and binds to or is predicted to bind to a protein encoded by an HLA-A36:01 allele, (b) ANGSLLNYL and binds to or is predicted to bind to a protein encoded by an HLA allele selected from a group consisting of HLA-C15:02, HLA-C08:01, HLA-C06:02, HLA-A02:04, HLA-C12:02, HLA-B44:02, HLA-C17:01 and HLA-B38:01, (c) ANGSLLNYLR and binds to or is predicted to bind to a protein encoded by an HLA-A74:01 allele, or an HLA-A31:01 allele, (d) EYMANGSL and binds to or is predicted to bind to a protein encoded by an HLA allele selected from a group consisting of HLA-C14:02, HLA-C14:03 and HLA-A24:02, (e) EYMANGSLLN and binds to or is predicted to bind to a protein encoded by an HLA-A24:02 allele or an HLA-A23:01 allele, (f) EYMANGSLLNY and binds to or is predicted to bind to a protein encoded by an HLA-A29:02 allele, (g) GSLLNYLR and binds to or is predicted to bind to a protein encoded by an HLA-A31:01 allele or an HLA-A74:01 allele, (h) GSLLNYLREM and binds to or is predicted to bind to a protein encoded by an HLA-B58:02 allele or an HLA-B57:01 allele, (i) ITEYMANGS and binds to or is predicted to bind to a protein encoded by an HLA-A01:01 allele, (j) ITEYMANGSL and binds to or is predicted to bind to a protein encoded by an HLA-A01:01 allele, (k) ITEYMANGSLL and binds to or is predicted to bind to a protein encoded by an HLA-A01:01 allele, (1) MANGSLLNYL and binds to or is predicted to bind to a protein encoded by an HLA allele selected from a group consisting of HLA-C17:01, HLA-C02:02, HLA-B35:01, HLA-C03:03, HLA-C08:01, HLA-B35:03, HLA-C12:02, HLA-C01:02, HLA-C03:04 and HLA-C08:02, (m) MANGSLLNYLR and binds to or is predicted to bind to a protein encoded by an HLA-A33:03 allele or an HLA-A74:01 allele, (n) NGSLLNYL and binds to or is predicted to bind to a protein encoded by an HLA-B14:02 allele, (o) NGSLLNYL and binds to or is predicted to bind to a protein encoded by an HLA allele selected from a group consisting of: HLA-A68:01, HLA-A33:03, HLA-A31:01 and HLA-A74:01, (p) SLLNYLREMR and binds to or is predicted to bind to a protein encoded by an HLA-A74:01 allele or an HLA-A31:01 allele, (q) TEYMANGSLL and binds to or is predicted to bind to a protein encoded by an HLA allele selected from a group consisting of: HLA-B40:01, HLA-B44:03, HLA-B49:01, HLA-B44:02 and HLA-B40:02, (r) TEYMANGSLLNY and binds to or is predicted to bind to a protein encoded by an HLA-B44:03 allele, (s) YMANGSLL and binds to or is predicted to bind to a protein encoded by an HLA allele selected from a group consisting of HLA-B15:09, HLA-C03:04, HLA-C03:03, HLA-C17:01, HLA-C03:02, HLA-C14:03, HLA-C14:02, HLA-C04:01, HLA-C02:02, HLA-A01:01, or (t) YMANGSLLN and binds to or is predicted to bind to a protein encoded by an HLA-A29:02 allele or an HLA-A01:01 allele.

[0075] In some embodiments, the one or more mutant BTK peptide sequences is specific for a cognate T cell receptor in complex with an HLA protein. In some embodiments, the composition comprises two or more mutant BTK peptide sequences.

[0076] In one aspect, provided herein is a composition comprising: at least one polypeptide comprising one or more mutant BTK peptide sequences, each having at least 8 contiguous amino acids from a C481S mutant BTK protein, the one or more mutant BTK peptide sequences selected from Table 34, further comprising three or more amino acid residues that are heterologous to the mutant BTK protein, linked to the N-terminus or C-terminus of a mutant BTK peptide sequence, wherein the three or more amino acid residues enhance processing of the mutant BTK peptide sequences inside a cell and/or enhance presentation of an epitope of the mutant BTK peptide sequences. In some embodiments, the three or more amino acid residues that are heterologous to the mutant BTK protein comprise an amino acid sequence from CMV-pp65, HIV, MART-1 or a non-viral, non-BTK endogenous peptide.

[0077] In some embodiments, the three or more amino acid residues that are heterologous to the mutant BTK protein comprise at least 3, 4, 5, 6, 7, 8, 9, 10, 11, 12, 13, 14, 15, 16, 17, 18, 19, 20, 21, 22, 23, 24, 25, 26, 27, 28, 29, 30, 31, 32, 33, 34, 35, 36, 37, 38, 39, or 40 amino acids.

[0078] In some embodiments, the three or more amino acid residues that are heterologous to the mutant BTK protein comprise at most 5, 6, 7, 8, 9, 10, 11, 12, 13, 14, 15, 16, 17, 18, 19, 20, 21, 22, 23, 24, 25, 26, 27, 28, 29, 30, 31, 32, 33, 34, 35, 36, 37, 38, 39, 40, 50, 60, 70, 80, 90, or 100 amino acids.

[0079] In one aspect, provided herein is a composition comprising: at least one polypeptide of the formula (N-terminal Xaa)_{N}-(Xaa_{BTK})_{P}-(Xaa-C terminal)_{C} wherein, P is an integer greater than 7; (Xaa_{BTK})_{P} is a mutant BTK peptide sequence comprising at least 8 contiguous amino acids selected from the sequence IFIITEYMANGSLLNYLREMRHR of a mutant BTK protein comprising the C481S mutant amino acid; N is (i) 0 or (ii) an integer greater than 2; (N-terminal Xaa)_{N} is any amino acid sequence heterologous to the mutant BTK protein; C is (i) 0 or (ii) an integer greater than 2; (Xaa-C terminal)_{C} is any amino acid sequence heterologous to the mutant BTK protein; and both N and C are 0.

[0080] In some embodiments, the (N-terminal Xaa)_{N} and/or (Xaa-C terminal)_{C} comprises an amino acid sequence of a CMV-pp65, HIV, MART-1 or a non-viral, non-BTK endogenous protein or peptide.

[0081] In some embodiments, the N and/or C is an integer greater than 3, 4, 5, 6, 7, 8, 9, 10, 11, 12, 13, 14, 15, 16, 17, 18, 19, 20, 21, 22, 23, 24, 25, 26, 27, 28, 29, 30, 31, 32, 33, 34, 35, 36, 37, 38, 39, or 40.

[0082] In some embodiments, the N and/or C is an integer less than 5, 6, 7, 8, 9, 10, 11, 12, 13, 14, 15, 16, 17, 18, 19, 20, 21, 22, 23, 24, 25, 26, 27, 28, 29, 30, 31, 32, 33, 34, 35, 36, 37, 38, 39, 40, 50, 60, 70, 80, 90, or 100. In some embodiments, the composition of any one of claims 8-10, wherein N is 0. In some embodiments, the 8-10, wherein C is 0.

[0083] In one aspect, provided herein is a composition comprising a polynucleotide sequence encoding the polypeptide of claim 1. In one aspect, the composition comprises a polynucleotide sequence encoding one or more peptide sequences of any of the mutant BTK peptides described above, and in Tables 34 and Table 36. In some embodiments, the at least one polypeptide comprises at least 3, 4, 5, 6, 7, 8, 9, or 10 mutant BTK peptide sequences. In some embodiments, the at least one of the mutant BTK peptide sequences comprises at least 9, 10, 11, 12, 13, 14, 15, 16, 17, 18, 19, 20, 21, 22, 23, 24, 25, 26, 27, 28, 29, 30, 31, 32, 33, 34, 35, 36, 37, 38, 39, or 40 contiguous amino acids of a mutant BTK protein. In some embodiments, at least 2, 3, 4, 5, 6, 7, 8, 9, or 10 of the mutant BTK peptide sequences comprise at least 9, 10, 11, 12, 13, 14, 15, 16, 17, 18, 19, 20, 21, 22, 23, 24, 25, 26, 27, 28, 29, 30, 31, 32, 33, 34, 35, 36, 37, 38, 39, or 40 contiguous amino acids of a mutant BTK protein. In some embodiments, the each of the mutant BTK peptide sequences or each of the two or more BTK peptide sequences comprises at least 9, 10, 11, 12, 13, 14, 15, 16, 17, 18, 19, 20, 21, 22, 23, 24, 25, 26, 27, 28, 29, 30, 31, 32, 33, 34, 35, 36, 37, 38, 39, or 40 contiguous amino acids of a mutant BTK protein. In some embodiments, the at least one polypeptide comprises at least one mutant BTK peptide sequence that binds to or is predicted to bind to a protein encoded by an HLA allele listed in Table 35 with an affinity of 150 nM or less and/or a half-life of 2 hours or more. In some embodiments, the mutant BTK peptide sequences comprises (a) a first mutant BTK peptide sequence selected from Table 34 and binds to or is predicted to bind to a protein encoded by an HLA allele; and (b) a second BTK peptide having a C481S mutation, wherein the first mutant BTK peptide sequence and the second mutant BTK peptide sequence are non-identical.

[0084] In some embodiments, the at least one polypeptide comprises at least one mutant BTK peptide sequence that binds to a protein encoded by an HLA allele with an affinity of less than 10 μM, less than 1 μM, less than 500 nM, less than 400 nM, less than 300 nM, less than 250 nM, less than 200 nM, less than 150 nM, less than 100 nM, or less than 50 nM.

[0085] In some embodiments, the at least one polypeptide comprises at least one mutant BTK peptide sequence that binds to a protein encoded by an HLA allele with a stability of greater than 24 hours, greater than 12 hours, greater than 9 hours, greater than 6 hours, greater than 5 hours, greater than 4 hours, greater than 3 hours, greater than 2 hours, greater than 1 hour, greater than 45 minutes, greater than 30 minutes, greater than 15 minutes, or greater than 10 minutes.

[0086] In some embodiments, the (N-terminal Xaa)_{N} comprises an amino acid sequence of IDIIMKIRNA, FFFFFFFFFFFFFFFFFFFFIIFFIFFWMC, FFFFFFFFFFFFFFFFFFFFFFFFAAFWFW, IFFIFFIIFFFFFFFFFFFFIIIIIIIWEC, FIFFFIIFFFFFIFFFFFIFIIIIIIFWEC, TEY, WQAGILAR, HSYTTAE, PLTEEKIK, GALHFKPGSR, RRANKDATAE, KAFISHEEKR, TDLSSRFSKS, FDLGGGTFDV, CLLLHYSVSK, or MTEYKLVVV. In some embodiments, the (C-terminal Xaa)_{C} comprises an amino acid sequence of KKNKKDDIKD, AGNDDDDDDDDDDDDDDDDDKKDKDDDDDD, AGNKKKKKKKNNNNNNNNNNNN NNNNN, AGRDDDDDDDDDDDDDDDDDDDDDDDDDDD, GKSALTIQL, GKSALTI, QGQNLKYQ, ILGVLLLI, EKEGKISK, AASDFIFLVT, KELKQVASPF, KKKLINEKKE, KKCDISLQFF, KSTAGDTHLG, ATFYVAVTVP, LTIQLIQNHFVDEYDPTIEDSYRKQVVIDG, or TIQLIQNHFVDEYDPTIEDSYRKQVVIDGE.

[0087] In some embodiments, the at least one of the mutant BTK peptide sequences comprises a mutant amino acid not encoded by the genome of a cancer cell of a subject.

[0088] In some embodiments, each of the mutant BTK peptide sequences are present at a concentration at least 1 μg/mL, at least 10 μg/mL, at least 25 μg/mL, at least 50 μg/mL, or at least 100 μg/mL. In some embodiments, the each of the mutant BTK peptide sequences are present at a concentration at most 5000 g/mL, at most 2500 μg/mL, at most 1000 μg/mL, at most 750 μg/mL, at most 500 μg/mL, at most 400 g/mL, or at most 300 μg/mL. In some embodiments, the each of the mutant BTK peptide sequences are present at a concentration of from 10 μg/mL to 5000 μg/mL, 10 μg/mL to 4000 μg/mL, 10 μg/mL to 3000 g/mL, 10 μg/mL to 2000 μg/mL, 10 μg/mL to 1000 μg/mL, 25 μg/mL to 500 μg/mL, or 50 μg/mL to 300 g/mL. In some embodiments, the composition further comprises an immunomodulatory agent or an adjuvant. In some embodiments, the adjuvant is polyICLC.

[0089] In one aspect, provided herein is a pharmaceutical composition comprising: (a) the composition described above, and (b) a pharmaceutically acceptable excipient. In some embodiments, the pharmaceutical composition further comprises a pH modifier. In some embodiments, the pharmaceutical composition is a vaccine composition. In some embodiments, the pharmaceutical composition is aqueous. In some embodiments, the pharmaceutical composition comprises the one or more of the at least one polypeptide is bounded by (a) pI>5 and HYDRO>−6, (b) pI>8 and HYDRO>−8, (c) pI<5 and HYDRO>−5, (d) pI>9 and HYDRO<−8, (e) pI>7 and a HYDRO value of >−5.5, (f) pI<4.3 and −4≥HYDRO≥−8, (g) pI>0 and HYDRO≤−8, pI>0 and HYDRO>−4, or pI>4.3 and −4≥HYDRO≥−8, (h) pI>0 and HYDRO>−4, or pI>4.3 and HYDRO≤−4, (i) pI>0 and HYDRO>−4, or pI>4.3 and −4≥HYDRO≥−9, (j) 5>pI>12 and −4≥HYDRO≥−9.

[0090] In some embodiments, the pH modifier is a base. In some embodiments, the pH modifier is a conjugate base of a weak acid. In some embodiments, the pH modifier is a pharmaceutically acceptable salt. In some embodiments, the pH modifier is a dicarboxylate or tricarboxylate salt. In some embodiments, the pH modifier is citric acid and/or a citrate salt. In some embodiments, the citrate salt is disodium citrate and/or trisodium citrate. In some embodiments, the pH modifier is succinic acid and/or a succinate salt. In some embodiments, the succinate salt is a disodium succinate and/or a monosodium succinate. In some embodiments, wherein the succinate salt is disodium succinate hexahydrate. In some embodiments, the pH modifier is present at a concentration of from 0.1 mM-1 mM. In some embodiments, the pharmaceutically acceptable carrier comprises a liquid. In some embodiments, the pharmaceutically acceptable carrier comprises water.

[0091] In some embodiments, the pharmaceutically acceptable carrier comprises a sugar. In some embodiments, the sugar comprises dextrose. In some embodiments, the dextrose is present at a concentration of from 1-10% w/v. In some embodiments, the sugar comprises trehalose. In some embodiments, the sugar comprises sucrose.

[0092] In some embodiments, the pharmaceutically acceptable carrier comprises dimethyl sulfoxide (DMSO). In some embodiments, the DMSO is present at a concentration from 0.1% to 10%, 0.5% to 5%, or 1% to 3%. In some embodiments, the pharmaceutically acceptable carrier does not comprise dimethyl sulfoxide (DMSO). In some embodiments, the pharmaceutical composition is lyophilizable. In some embodiments, the pharmaceutical composition further comprises an immunomodulator or adjuvant. In some embodiments, wherein the immunomodulator or adjuvant is selected from the group consisting of poly-ICLC, 1018 ISS, aluminum salts, Amplivax, AS15, BCG, CP-870,893, CpG7909, CyaA, ARNAX, STING agonists, dSLIM, GM-CSF, IC30, IC31, Imiquimod, ImuFact IMP321, IS Patch, ISS, ISCOMATRIX, JuvImmune, LipoVac, MF59, monophosphoryllipid A, Montanide IMS 1312, Montanide ISA 206, Montanide ISA 50V, Montanide ISA-51, OK-432, OM-174, OM-197-MP-EC, ONTAK, PepTel®, vector system, PLGA microparticles, resiquimod, SRL172, Virosomes and other Virus-like particles, YF-17D, VEGF trap, R848, beta-glucan, Pam3Cys, and Aquila's QS21 stimulon.

[0093] In some embodiments, the immunomodulator or adjuvant comprises poly-ICLC. In some embodiments, a ratio of poly-ICLC to peptides in the pharmaceutical composition is from 2:1 to 1:10 v:v. In some embodiments, the ratio of poly-ICLC to peptides in the pharmaceutical composition is about 1:1, 1:2, 1:3, 1:4 or 1:5 v:v. In some embodiments, the ratio of poly-ICLC to peptides in the pharmaceutical composition is about 1:3 v:v.

[0094] In one aspect, provided herein is a method of treating a cancer in a subject, comprising administering to the subject the pharmaceutical composition as described above.

[0095] In one aspect, provided herein is a method of treating a cancer in a subject, the method comprising: administering to the subject in need thereof a composition comprising a peptide having a sequence selected from Table 34, 36 or 37 left column; wherein the subject expresses a protein encoded by any one of HLA alleles listed in the right column corresponding to the peptide within the table. In some embodiments, the invention provides a method of treating cancer in a subject, comprising: administering to the subject in need thereof, a composition comprising one or more mutant BTK peptides, or one or more nucleic acids encoding the one or more mutant BTK peptides, wherein each mutant BTK peptide comprises at least 8 contiguous amino acids of a mutant BTK protein comprising a mutation C481S, wherein at least one of the one or more peptides binds to a protein encoded by an HLA allele listed in Table 34, 36 or 37, which is expressed by the subject. In some embodiments, the peptide binds to HLA protein with an affinity of 150 nM or less and/or a half-life of 2 hours or more.

[0096] In one aspect, provided herein is a method of treating a cancer in a subject, comprising administering to the subject in need thereof, a first and a second peptide or a nucleic acid encoding the first and the second peptide, wherein the first peptide has an amino acid sequence selected from: Tables 34, 36 or 37; and the second peptide has an amino acid sequence selected from any one of Tables 34, 36 or 37.

[0097] In some embodiments, an immune response is elicited in the subject. In some embodiments, the immune response is a humoral response.

[0098] In some embodiments, the one or more mutant BTK peptides are administered simultaneously, separately or sequentially.

[0099] In some embodiments, the second peptide is sequentially administered after a time period sufficient for the first peptide to activate the second T cells.

[0100] In some embodiments, the cancer is selected from the group consisting of certain types of lymphoma and certain types of leukemia. In some embodiments, the cancer is an acute lymphoblastic leukemia (ALL), a mantle cell lymphoma (MCL), a chronic lymphocytic lymphoma or a B-cell non-Hodgkin's lymphoma.

[0101] In some embodiments, the further comprising administering at least one additional therapeutic agent or modality.

[0102] In some embodiments, the at least one additional therapeutic agent or modality is surgery, a checkpoint inhibitor, an antibody or fragment thereof, a chemotherapeutic agent, radiation, a vaccine, a small molecule, a T cell, a vector, and APC, a polynucleotide, an oncolytic virus or any combination thereof.

[0103] In some embodiments, the at least one additional therapeutic agent is an anti-PD-1 agent and anti-PD-L1 agent, an anti-CTLA-4 agent, or an anti-CD40 agent. In some embodiments, the additional therapeutic agent is administered before, simultaneously, or after administering the mutant BTK peptide sequences.

[0104] In one aspect, provided herein is a method of treating a cancer in a subject, comprising the steps of: (a) identifying a first protein expressed by the subject, wherein the first protein is encoded by a first HLA allele of the subject and wherein the first HLA allele is an HLA allele provided in any one of one of Tables 34, 37 or 38, (b) administering to the subject (i) a first mutant BTK peptide, wherein the first mutant BTK peptide is a peptide to the first HLA allele provided according any one of one of Tables 34, 36 or 37; or (ii) a polynucleic acid encoding the first mutant BTK peptide.

[0105] In one aspect, provided herein is a method of identifying a subject with cancer as a candidate for a therapeutic, the method comprising identifying the subject as a subject that expresses a protein encoded by an HLA of one of Tables 34, 36 or 37, wherein the therapeutic is a mutant BTK peptide or a nucleic acid encoding the mutant BTK peptide, wherein the mutant BTK peptide comprises at least 8 contiguous amino acids of a mutant BTK protein comprising a mutation at C481, wherein the peptide (i) comprises a mutation of C481S, (ii) comprises a sequence of a peptide of any one of Tables 34, 36 or 37 and (iii) binds to a corresponding protein encoded by the HLA of any one of Tables 34, 36 or 37.

[0106] In some aspects, provided herein is a composition comprising a polypeptide comprising one or more mutant EGFR peptide sequences from a T790M mutant EGFR protein, the one or more mutant EGFR peptide sequences comprising at least 8 contiguous amino acids selected from the group consisting of:

LIMQLMPF,
TVQLIMQL,
TSTVQLIMQL,
TVQLIMQLM,
VQLIMQLM,
STVQLIMQL,
and
LTSTVQLIM.

[0107] In some embodiments, the one or more mutant EGFR peptide sequences are specific for a cognate T cell receptor in complex with an HLA protein.

[0108] In some embodiments, the composition comprises a mixture of two or three or more mutant EGFR peptide sequences. In some embodiments, the composition comprises at least 2, 3, 4, 5, 6, 7, 8, 9, or 10 mutant EGFR peptide sequences. In some embodiments at least 9, 10, 11, 12, 13, 14, 15, 16, 17, 18, 19, 20, 21, 22, 23, 24, 25, 26, 27, 28, 29, 30, 31, 32, 33, 34, 35, 36, 37, 38, 39, or 40 contiguous amino acids of a mutant EGFR protein.

[0109] In some aspects, provided herein is a composition comprising at least one polypeptide comprising one or more mutant EGFR peptide sequences from a T790M mutant EGFR protein, the one or more mutant EGFR peptide sequence comprising at least 8 contiguous amino acids selected from the group consisting of: LIMQLMPF, TVQLIMQL, TSTVQLIMQL, TVQLIMQLM, VQLIMQLM, STVQLIMQL and LTSTVQLIM, further comprising three or more amino acid residues that are heterologous to the mutant EGFR protein, linked to the N-terminus or C-terminus of a mutant EGFR peptide sequence, wherein the three or more amino acid residues enhance processing of the mutant EGFR peptide sequences inside a cell and/or enhance presentation of an epitope of the mutant EGFR peptide sequences.

[0110] In some embodiments, the three or more amino acid residues that are heterologous to the mutant EGFR protein comprise an amino acid sequence from CMV-pp65, HIV, MART-1 or a non-viral, non-EGFR endogenous peptide.

[0111] In some embodiments, the three or more amino acid residues that are heterologous to the mutant EGFR protein comprise at least 3, 4, 5, 6, 7, 8, 9, 10, 11, 12, 13, 14, 15, 16, 17, 18, 19, 20, 21, 22, 23, 24, 25, 26, 27, 28, 29, 30, 31, 32, 33, 34, 35, 36, 37, 38, 39, or 40 amino acids.

[0112] In some embodiments, the three or more amino acid residues that are heterologous to the mutant EGFR protein are linked to the N-terminus or C-terminus of the two or more mutant EGFR peptide sequences comprises at most 5, 6, 7, 8, 9, 10, 11, 12, 13, 14, 15, 16, 17, 18, 19, 20, 21, 22, 23, 24, 25, 26, 27, 28, 29, 30, 31, 32, 33, 34, 35, 36, 37, 38, 39, 40, 50, 60, 70, 80, 90, or 100 amino acids.

[0113] In some embodiments, (Xaa-C terminal)_{C} is any amino acid sequence heterologous to the mutant EGFR protein; and, both N and C are not 0.

[0114] In some embodiments, (N-terminal Xaa)_{N} and/or (Xaa-C terminal)_{C} comprises an amino acid sequence of a CMV-pp65, HIV, MART-1 or a non-viral, non-EGFR endogenous protein or peptide.

[0115] In some embodiments, N and/or C is an integer greater than 3, 4, 5, 6, 7, 8, 9, 10, 11, 12, 13, 14, 15, 16, 17, 18, 19, 20, 21, 22, 23, 24, 25, 26, 27, 28, 29, 30, 31, 32, 33, 34, 35, 36, 37, 38, 39, or 40.

[0116] In some embodiments, N and/or C is an integer less than 5, 6, 7, 8, 9, 10, 11, 12, 13, 14, 15, 16, 17, 18, 19, 20, 21, 22, 23, 24, 25, 26, 27, 28, 29, 30, 31, 32, 33, 34, 35, 36, 37, 38, 39, 40, 50, 60, 70, 80, 90, or 100. In some embodiments, N is 0. In some embodiments, C is 0.

[0117] In one aspect, provided herein is a composition comprising a polynucleotide sequence encoding the polypeptide described above. In one embodiment, composition comprises a polynucleotide sequence encoding one or more mutant EGFR peptide sequences disclosed herein.

[0118] In some embodiments, the composition comprising one or more mutant EGFR peptide sequences further comprises one or more mutant EGFR peptides selected from the Table 40A-40D.

[0119] In some embodiments, the at least one polypeptide comprises at least 3, 4, 5, 6, 7, 8, 9, or 10 mutant EGFR peptide sequences.

[0120] In some embodiments, at least one of the mutant EGFR peptide sequences comprises at least 9, 10, 11, 12, 13, 14, 15, 16, 17, 18, 19, 20, 21, 22, 23, 24, 25, 26, 27, 28, 29, 30, 31, 32, 33, 34, 35, 36, 37, 38, 39, or 40 contiguous amino acids of a mutant EGFR protein. In some embodiments, at least 2, 3, 4, 5, 6, 7, 8, 9, or 10 of the mutant EGFR peptide sequences comprise at least 9, 10, 11, 12, 13, 14, 15, 16, 17, 18, 19, 20, 21, 22, 23, 24, 25, 26, 27, 28, 29, 30, 31, 32, 33, 34, 35, 36, 37, 38, 39, or 40 contiguous amino acids of a mutant EGFR protein. In some embodiments, each of the mutant EGFR peptide sequences or each of the two or more EGFR peptide sequences comprises at least 9, 10, 11, 12, 13, 14, 15, 16, 17, 18, 19, 20, 21, 22, 23, 24, 25, 26, 27, 28, 29, 30, 31, 32, 33, 34, 35, 36, 37, 38, 39, or 40 contiguous amino acids of a mutant EGFR protein.

[0121] In some embodiments, the at least one polypeptide comprises at least one mutant EGFR peptide sequence that binds to or is predicted to bind to a protein encoded by an HLA allele listed in Table 41 with an affinity of 150 nM or less and/or a half-life of 2 hours or more.

[0122] In some embodiments, the mutant EGFR peptide sequences comprise a first mutant EGFR peptide sequence that selected from a group consisting of STVQLIMQL, LIMQLMPF, LTSTVQLIM, TVQLIMQL, TSTVQLIMQL, TVQLIMQLM, and VQLIMQLM and a second mutant EGFR peptide sequence having a T790M mutation.

[0123] In some embodiments, the mutant EGFR peptide sequences comprise: (a) a first mutant EGFR peptide sequence that selected from a group consisting of STVQLIMQL, LIMQLMPF, LTSTVQLIM, TVQLIMQL, TSTVQLIMQL, TVQLIMQLM, and VQLIMQLM, wherein the first mutant EGFR peptide sequence binds to or is predicted to bind to a protein encoded by an HLA-A68:02, HLA-C15:02, HLA-A25:01, HLA-B57:03, HLA-C12:02, HLA-C03:02, HLA-A26:01, HLA-C12:03, HLA-C06:02, HLA-C03:03, HLA-B52:01, HLA-A30:01, HLA-C02:02, HLA-C12:03, HLA-A11:01, HLA-A32:01, HLA-A02:04, HLA-A68:01, HLA-B15:09, HLA-C17:01, HLA-C03:04, HLA-B08:01, HLA-A01:01, HLA-B42:01, HLA-B57:01, HLA-B15:01, HLA-B14:02, HLA-B37:01, HLA-A36:01, HLA-C15:02, HLA-B15:09, HLA-C12:02, HLA-B38:01, HLA-C03:03, HLA-A02:03, HLA-B58:02, HLA-C08:01, HLA-B35:01, HLA-B40:01, and/or an HLA-B35:03 allele; and (b) a second EGFR peptide sequence comprising a T790M mutation, wherein the first and the second peptides are not identical.

[0124] In some embodiments, the at least one polypeptide comprises at least one mutant EGFR peptide sequence that binds to a protein encoded by an HLA allele with an affinity of less than 10 μM, less than 1 μM, less than 500 nM, less than 400 nM, less than 300 nM, less than 250 nM, less than 200 nM, less than 150 nM, less than 100 nM, or less than 50 nM.

[0125] In some embodiments, the at least one polypeptide comprises at least one mutant EGFR peptide sequence that binds to a protein encoded by an HLA allele with a stability of greater than 24 hours, greater than 12 hours, greater than 9 hours, greater than 6 hours, greater than 5 hours, greater than 4 hours, greater than 3 hours, greater than 2 hours, greater than 1 hour, greater than 45 minutes, greater than 30 minutes, greater than 15 minutes, or greater than 10 minutes.

[0126] In some embodiments, (N-terminal Xaa)_{N} comprises an amino acid sequence of IDIIMKIRNA, FFFFFFFFFFFFFFFFFFFFIIFFIFFWMC, FFFFFFFFFFFFFFFFFFFFFFFFAAFWFW, IFFIFFIIFFFFFFFFFFFFIIIIIIIWEC, FIFFFIIFFFFFIFFFFFIFIIIIIIFWEC, TEY, WQAGILAR, HSYTTAE, PLTEEKIK, GALHFKPGSR, RRANKDATAE, KAFISHEEKR, TDLSSRFSKS, FDLGGGTFDV, CLLLHYSVSK, or MTEYKLVVV.

[0127] In some embodiments, (C-terminal Xaa)_{C} comprises an amino acid sequence of KKNKKDDIKD, AGNDDDDDDDDDDDDDDDDDKKDKDDDDDD, AGNKKKKKKKNNNNNNNNNNNNNNNNN, AGRDDDDDDDDDDDDDDDDDDDDDDDDDDD, GKSALTIQL, GKSALTI, QGQNLKYQ, ILGVLLLI, EKEGKISK, AASDFIFLVT, KELKQVASPF, KKKLINEKKE, KKCDISLQFF, KSTAGDTHLG, ATFYVAVTVP, LTIQLIQNHFVDEYDPTIEDSYRKQVVIDG, or TIQLIQNHFVDEYDPTIEDSYRKQVVIDGE.

[0128] In some embodiments, at least one of the mutant EGFR peptide sequences comprises a mutant amino acid not encoded by the genome of a cancer cell of a subject.

[0129] In some embodiments, the mutant EGFR peptide sequences are present at a concentration at least 1 μg/mL, at least 10 μg/mL, at least 25 μg/mL, at least 50 μg/mL, or at least 100 μg/mL.

[0130] In some embodiments, wherein each of the mutant EGFR peptide sequences are present at a concentration at most 5000 μg/mL, at most 2500 μg/mL, at most 1000 μg/mL, at most 750 μg/mL, at most 500 μg/mL, at most 400 μg/mL, or at most 300 μg/mL.

[0131] In some embodiments, each of the mutant EGFR peptide sequences are present at a concentration of from 10 μg/mL to 5000 μg/mL, 10 μg/mL to 4000 μg/mL, 10 μg/mL to 3000 μg/mL, 10 μg/mL to 2000 g/mL, 10 μg/mL to 1000 μg/mL, 25 μg/mL to 500 μg/mL, or 50 μg/mL to 300 μg/mL.

[0132] In some embodiments, the composition further comprises an immunomodulatory agent or an adjuvant. In some embodiments, the adjuvant is polyICLC.

[0133] In one aspect, provided herein is a pharmaceutical composition comprising: (a) the composition comprising the at least one polypeptide comprises at least one mutant EGFR peptide sequence as described above, and (b) a pharmaceutically acceptable excipient.

[0134] In some embodiments, the pharmaceutical composition further comprises a pH modifier.

[0135] In some embodiments, the pharmaceutical composition is a vaccine composition.

[0136] In some embodiments, the pharmaceutical composition is aqueous.

[0137] In some embodiments, the one or more of the at least one polypeptide is bounded by pI>5 and HYDRO>−6, pI>8 and HYDRO>−8, pI<5 and HYDRO>−5, pI>9 and HYDRO<−8, pI>7 and a HYDRO value of >−5.5, pI<4.3 and −4≥HYDRO≥−8, pI>0 and HYDRO<−8, pI>0 and HYDRO>−4, or pI>4.3 and −4≥HYDRO≥−8, pI>0 and HYDRO>−4, or pI>4.3 and HYDRO≤−4, pI>0 and HYDRO>−4, or pI>4.3 and −4≥HYDRO≥−9, 5>pI>12 and −4≥HYDRO≥−9.

[0138] In some embodiments, the pharmaceutical composition comprises a pH modifier, which is a base.

[0139] In some embodiments, the pH modifier is a conjugate base of a weak acid.

[0140] In some embodiments, the pH modifier is a pharmaceutically acceptable salt.

[0141] In some embodiments, the pH modifier is a dicarboxylate or tricarboxylate salt.

[0142] In some embodiments, the pH modifier is citric acid and/or a citrate salt.

[0143] In some embodiments, the citrate salt is disodium citrate and/or trisodium citrate.

[0144] In some embodiments, the pH modifier is succinic acid and/or a succinate salt.

[0145] In some embodiments, the succinate salt is a disodium succinate and/or a monosodium succinate.

[0146] In some embodiments, the succinate salt is disodium succinate hexahydrate.

[0147] In some embodiments, the pH modifier is present at a concentration of from 0.1 mM-1 mM.

[0148] In some embodiments, the pharmaceutical composition comprises the pharmaceutically acceptable carrier comprises a liquid.

[0149] In some embodiments, the pharmaceutically acceptable carrier comprises water.

[0150] In some embodiments, the pharmaceutically acceptable carrier comprises a sugar.

[0151] In some embodiments, the sugar comprises dextrose.

[0152] In some embodiments, the dextrose is present at a concentration of from 1-10% w/v.

[0153] In some embodiments, the sugar comprises trehalose.

[0154] In some embodiments, the sugar comprises sucrose.

[0155] In some embodiments, the pharmaceutically acceptable carrier comprises dimethyl sulfoxide (DMSO).

[0156] In some embodiments, the DMSO is present at a concentration from 0.1% to 10%, 0.5% to 5%, or 1% to 3%.

[0157] In some embodiments, the pharmaceutically acceptable carrier does not comprise dimethyl sulfoxide (DMSO).

[0158] In some embodiments, the pharmaceutical composition is lyophilizable.

[0159] In some embodiments, the pharmaceutical composition further comprises an immunomodulator or adjuvant.

[0160] In some embodiments, the immunomodulator or adjuvant is selected from the group consisting of poly-ICLC, 1018 ISS, aluminum salts, Amplivax, AS15, BCG, CP-870,893, CpG7909, CyaA, ARNAX, STING agonists, dSLIM, GM-CSF, IC30, IC31, Imiquimod, ImuFact IMP321, IS Patch, ISS, ISCOMATRIX, JuvImmune, LipoVac, MF59, monophosphoryllipid A, Montanide IMS 1312, Montanide ISA 206, Montanide ISA 50V, Montanide ISA-51, OK-432, OM-174, OM-197-MP-EC, ONTAK, PepTel®, vector system, PLGA microparticles, resiquimod, SRL172, Virosomes and other Virus-like particles, YF-17D, VEGF trap, R848, beta-glucan, Pam3Cys, and Aquila's QS21 stimulon.

[0161] In some embodiments, the immunomodulator or adjuvant comprises poly-ICLC. In some embodiments, a ratio of poly-ICLC to peptides in the pharmaceutical composition is from 2:1 to 1:10 v:v. In some embodiments, the ratio of poly-ICLC to peptides in the pharmaceutical composition is about 1:1, 1:2, 1:3, 1:4 or 1:5 v:v. In some embodiments, the ratio of poly-ICLC to peptides in the pharmaceutical composition is about 1:3 v:v.

[0162] In one aspect, provided herein is a method of treating a cancer in a subject, comprising administering to the subject the pharmaceutical composition described above.

[0163] In one aspect, provided herein is a method of treating cancer in a subject, comprising administering to the subject in need thereof, a composition comprising one or more mutant EGFR peptides, or one or more nucleic acids encoding the one or more mutant EGFR peptides, wherein each mutant EGFR peptide comprises at least 8 contiguous amino acids of a mutant EGFR protein comprising a mutation T790M, wherein the one or more mutant EGFR peptides have an amino acid sequence set forth in Table 40A-40D; wherein at least one of the one or more peptides binds with an affinity of 150 nM or less and/or a half-life of 2 hours or more to a protein encoded by an binds to or is predicted to bind to a protein encoded by an HLA-A68:02, HLA-C15:02, HLA-A25:01, HLA-B57:03, HLA-C12:02, HLA-C03:02, HLA-A26:01, HLA-C12:03, HLA-C06:02, HLA-C03:03, HLA-B52:01, HLA-A30:01, HLA-C02:02, HLA-C12:03, HLA-A11:01, HLA-A32:01, HLA-A02:04, HLA-A68:01, HLA-B15:09, HLA-C17:01, HLA-C03:04, HLA-B08:01, HLA-A01:01, HLA-B42:01, HLA-B57:01, HLA-B15:01, HLA-B14:02, HLA-B37:01, HLA-A36:01, HLA-C15:02, HLA-B15:09, HLA-C12:02, HLA-B38:01, HLA-C03:03, HLA-A02:03, HLA-B58:02, HLA-C08:01, HLA-B35:01, HLA-B40:01, and/or an HLA-B35:03 allele; and, wherein said allele is expressed by the subject.

[0164] In one aspect, provided herein is a method of treating a subject with cancer, wherein the method comprises: administering to the subject in need thereof, a polypeptide comprising a mutant EGFR peptide sequence, or a polynucleotide encoding the mutant EGFR peptide, wherein (a) the mutant EGFR peptide has the sequence LIMQLMPF and the subject expresses a protein encoded by an HLA-C03:02 allele, (b) the mutant EGFR peptide has the sequence LTSTVQLIM and the subject expresses a protein encoded by an HLA allele selected from a group consisting of: HLA-C12:03, HLA-C15:02, HLA-B57:01, HLA-B57:01, HLA-A36:01, HLA-C12:02, HLA-C03:03 and HLA-B58:02, (c) the mutant EGFR peptide has the sequence QLIMQLMPF and the subject expresses a protein encoded by an HLA-A26:01 allele, (d) the mutant EGFR peptide has the sequence STVQLIMQL and the subject expresses a protein encoded by an HLA allele selected from a group consisting of: HLA-A68:02, HLA-C15:02, HLA-A25:01, HLA-B57:03, HLA-C12:02, HLA-A26:01, HLA-C12:03, HLA-C06:02, HLA-C03:03, HLA-A30:01, HLA-C02:02, HLA-A11:01, HLA-A32:01, HLA-A02:04, HLA-A68:01, HLA-B15:09, HLA-C03:04, HLA-B38:01, HLA-B57:01, HLA-A02:03, HLA-C08:01, HLA-B35:01 and HLA-B40:01, (e) the mutant EGFR peptide has the sequence STVQLIMQLM and the subject expresses a protein encoded by an HLA-B57:01 allele, (f) the mutant EGFR peptide has the sequence TSTVQLIMQL and the subject expresses a protein encoded by an HLA-C15:02 allele, (g) the mutant EGFR peptide has the sequence TVQLIMQL and the subject expresses a protein encoded by an HLA allele selected from a group consisting of: HLA-C17:01, HLA-B08:01, HLA-B42:01, HLA-B14:02, HLA-B37:01, HLA-B15:09, (h) the mutant EGFR peptide has the sequence TVQLIMQLM and the subject expresses a protein encoded by an HLA-B35:03 allele, or (i) the mutant EGFR peptide has the sequence VQLIMQLM and the subject expresses a protein encoded by an HLA allele selected from a group consisting of HLA-B52:01, HLA-B14:02 and HLA-B37:01.

[0165] In some embodiments, the method further comprises administering a second polypeptide composition comprising at least one mutant EGFR peptide, wherein the second mutant EGFR peptide is selected from Table 40A-40D.

[0166] In one aspect, provided herein is a method of treating cancer in a subject, the method comprising the steps of (a) identifying a first protein expressed by the subject, wherein the first protein is encoded by a first HLA allele of the subject and wherein the first HLA allele is an HLA allele provided in any one of one of Tables 41 to 43; and (b) administering to the subject (i) a first mutant EGFR peptide, wherein the first mutant EGFR peptide is a peptide to the first HLA allele provided according any one of the Tables 42Ai and ii, 42B or 43, or (ii) a polynucleic acid encoding the first mutant EGFR peptide. In some embodiments, the method of treating a cancer in a subject comprising the steps of: identifying one or more specific HLA subtypes expressed in the subject; administering to the subject, a composition comprising one or more mutant EGFR peptide described herein, such that the one or more peptide binds to at least one HLA subtype expressed by the subject with an affinity of 150 nM or less and/or a half-life of 2 hours or more.

[0167] In one aspect, provided herein is a method of treating a cancer in a subject, the method comprises the steps of (a) identifying the subject to express a protein encoded by an HLA-B57:01 allele of the subject's genome; (b) administering to the subject a composition comprising a peptide having a sequence STVQLIMQLM. In one embodiment, the method comprises the steps of (a) identifying if the subject expresses a protein encoded by an HLA-A26:01 allele of the subject's genome; (b) administering to the subject a composition comprising a peptide having a sequence QLIMQLMPF.

[0168] In some embodiments, an immune response is elicited in the subject. In one embodiment, the immune response is a humoral response.

[0169] In some embodiments, the one or more mutant EGFR peptide sequences are administered simultaneously, separately or sequentially. In some embodiments, the second peptide is sequentially administered after a time period sufficient for the first peptide to activate the second T cells.

[0170] In some embodiments, the cancer is selected from the group consisting of is selected from the group consisting of glioblastoma, lung adenocarcinoma, non-small cell lung cancer, lung squamous cell carcinoma, kidney carcinoma, head and neck cancers, ovarian cancers, cervical cancers, bladder cancers, gastric cancers, breast cancers, colorectal cancers, endometrial cancers and esophageal cancers.

[0171] In some embodiments, the method further comprises administering at least one additional therapeutic agent or modality.

[0172] In some embodiments, the at least one additional therapeutic agent or modality is surgery, a checkpoint inhibitor, an antibody or fragment thereof, a chemotherapeutic agent, radiation, a vaccine, a small molecule, a T cell, a vector, and APC, a polynucleotide, an oncolytic virus or any combination thereof. In some embodiments, the at least one additional therapeutic agent is an anti-PD-1 agent and anti-PD-L1 agent, an anti-CTLA-4 agent, or an anti-CD40 agent. In some embodiments, the additional therapeutic agent is administered before, simultaneously, or after administering the mutant EGFR peptide sequences.

[0173] In one aspect, provided herein is a method of identifying a subject with cancer as a candidate for a therapeutic, the method comprising identifying the subject as a subject that expresses a protein encoded by an HLA of one of Tables 41, 42Ai, 42Aii, 42B, or 43, wherein the therapeutic is a mutant EGFR peptide or a nucleic acid encoding the mutant EGFR peptide, wherein the mutant EGFR peptide comprises at least 8 contiguous amino acids of a mutant EGFR protein comprising a mutation at T790, wherein the peptide (i) comprises a mutation of T790M, (ii) comprises a sequence of a peptide of any one of Tables 42Ai, 42Aii, 42B, 43, and 44 and (iii) binds to a corresponding protein encoded by the HLA of any one of Tables 42Ai, 42Aii, 42B, 43, and 44.

[0174] In one aspect, provided herein is a method of identifying a subject as a candidate for a therapeutic, the method comprising determining that the subject expresses a protein encoded by an HLA-B57:01 allele, wherein the therapeutic comprises a mutant EGFR peptide having the amino acid sequence STVQLIMQLM.

[0175] In one aspect, provided herein is a method of identifying a subject as a candidate for a therapeutic, the method comprising determining that the subject expresses a protein encoded by an HLA-A26:01 allele, wherein the therapeutic comprises a mutant EGFR peptide having the amino acid sequence QLIMQLMPF.

### BRIEF DESCRIPTION OF THE DRAWINGS

[0176] The features of the present disclosure are set forth with particularity in the appended claims. A better understanding of the features and advantages of the present will be obtained by reference to the following detailed description that sets forth illustrative embodiments, in which the principles of the disclosure are utilized, and the accompanying drawings of which:

[0177] FIG. 1 illustrates an exemplary workflow for determination of GATA3 epitopes that can induce CD8+ and/or CD4+ T cells.

[0178] FIG. 2 illustrates an exemplary workflow of experiments for determining whether epitopes are processed and presented (top) and whether epitopes are recognized by T cells (bottom). This workflow confirmed that GATA3 neoantigens were processed and presented (detected by mass spectrometry) and GATA3 neoantigens bound to an HLA multimer could be recognized by a recombinant T cell receptor (TCR) expressed in a Jurkat cell line.

[0179] FIG. 3 illustrates an exemplary schematic of a workflow for detection of GATA3 neoORF epitopes by mass spectrometry. For peptide isolation, batch lysis was performed and an HLA class I pan antibody (W6/32) is used for immunoprecipitation.

[0180] FIG. 4 illustrates an exemplary schematic of a workflow for GATA3 antigen-specific expansion of CD8+ T cells.

[0181] FIG. 5 illustrates a summary of experiments showing that predicted GATA3 epitopes to HLA-A02 (left), HLA-B07 (middle) and HLA-B08 (right) can be detected by mass spectrometry.

[0182] FIG. 6 is an illustration of the GATA3 neoORF. The shaded region represents the portion of the GATA3 neoORF sequence portion shared by all patients (common region) and shared by some patients (variable region).

[0183] FIG. 7A is an illustration of the GATA3 neoORF sequence (SEQ ID NO: 2) with the variable region sequence (SEQ ID NO: 3) and common region sequences (SEQ ID NO: 4).

[0184] FIG. 7B depicts a schematic showing the GATA3 sequence (SEQ ID NO: 1) with the neoORF sequence (SEQ ID NO: 2) and that 3 predicted HLA-02:01 epitopes, 2 predicted HLA-B07:02 epitopes and 1 predicted HLA-B08:01 epitopes were observed by mass spectrometry. This data shows that the epitopes are targetable.

[0185] FIG. 7C is an illustration of an example of a peptide design scheme of overlapping peptides (OLPs) across the entire GATA3 neoORF region.

[0186] FIG. 7D is an exemplary amino acid sequence of variable region of GATA3 neo ORF (SEQ ID NO: 3)

[0187] FIG. 7E is an exemplary amino acid sequence of common region of GATA3 neo ORF (SEQ ID NO: 4)

[0188] FIG. 8 is a graph depicting the number of therapeutic class I GATA3 neoORF epitopes vs percent of patients containing these epitopes. Most patients will have 4-5 epitopes.

[0189] FIG. 9A depicts example results showing antigen specific CD8⁺ T cell responses to the indicated peptide using a PBMC sample from a human donor.

[0190] FIG. 9B depicts example results showing antigen specific CD8⁺ T cell responses to the indicated peptides using PBMC samples from human donors.

[0191] FIG. 9C depicts example results showing antigen specific CD8⁺ T cell responses to the indicated peptides using PBMC samples from human donors.

[0192] FIG. 10A depicts example results showing antigen specific CD8⁺ T cell responses to the indicated peptides using PBMC samples from human donors.

[0193] FIG. 10B depicts example results showing antigen specific CD8⁺ T cell responses to the indicated peptides using PBMC samples from human donors.

[0194] FIG. 11 depicts a FACS analysis of antigen-specific induction of IFNγ and TNFα levels of CD4⁺ cells from a healthy HLA-A02:01 donor stimulated with APCs loaded with or without a GATA3 neoORF peptide.

[0195] FIG. 12A shows that the indicated peptides were soluble at the indicated peptide concentrations in the pharmaceutical compositions with a 5 mM or 0.25 mM succinate, no DMSO, 5% dextrose in water (5DW) and no polyICLC.

[0196] FIG. 12B shows that the indicated peptides were soluble at the indicated peptide concentrations in the pharmaceutical compositions with a 5 mM or 0.25 mM succinate, no DMSO, 5% dextrose in water (5DW) and with polyICLC.

[0197] FIG. 12C shows that the indicated peptides were soluble at the indicated peptide concentrations in the pharmaceutical compositions with a 5 mM or 0.25 mM succinate, no DMSO, 5% dextrose in water (5DW) and with polyICLC at the indicated peptide:polyICLC ratio.

[0198] FIG. 13 shows amino acid sequence of the common region of GATA3 frame-shift mutations (SEQ ID NO: 4).

[0199] FIG. 14 shows Kaplan-Meier survival curve for patients in the MSK-IMPACT breast cancer dataset.

[0200] FIG. 15 shows simulated count of presented epitopes per patient.

[0201] FIG. 16 shows alignment of GATA3 wild-type and mutation nucleotide sequences.

[0202] FIG. 17 shows alignment of GATA3 wild-type and mutation amino acid sequences.

[0203] FIG. 18 shows GATA3 mutation encoded plasmid map.

[0204] FIG. 19 shows multi-alignment of GATA3 mutation gene and DNA sequencing data of GATA3 mutation plasmid construct.

[0205] FIG. 20 shows the restriction enzyme digestion of GATA3 mutation plasmid with AfIII.

[0206] FIG. 21 shows MHC class I and MHC class II expression of the GATA3 transduced HEK 293T cells.

[0207] FIGS. 22A-22D show HLA-A02 and MHC-ABC expression profile of HLA-A02.01, HLA-B07.02, and HLA-B08.01 transfected GATA3 HEK293T cells.

[0208] FIG. 22A shows Non-transfected GATA3 HEK293T cells.

[0209] FIG. 22B shows HLA-A02.01 transfected GATA3 HEK293T cells.

[0210] FIG. 22C shows HLA-B07.02 transfected GATA3 HEK293T cells.

[0211] FIG. 22D shows HLA-B08.01 transfected GATA3 HEK293T cells.

[0212] FIG. 23 shows detection of predicted peptide epitopes derived from the common region of the GATA3 neoORF stably expressed in HEK293T cells. The sequence in light gray and black indicate the variable and common regions of the GATA3 neoORF, respectively.

[0213] FIG. 24A shows MS/MS spectra for the endogenously processed peptide epitope SMLTGPPARV (bottom) and its corresponding synthetic peptide (top).

[0214] FIG. 24B shows head-to-toe plot of MS/MS spectral match.

[0215] FIG. 25A shows MS/MS spectra for the endogenously processed peptide epitope MLTGPPARV (bottom) and its corresponding synthetic peptide (top).

[0216] FIG. 25B shows Head-to-toe plot of spectral match.

[0217] FIG. 26A shows MS/MS spectra for the endogenously processed peptide epitope KPKRDGYMF (bottom) and its corresponding synthetic peptide (top).

[0218] FIG. 26B shows Head-to-toe plot of spectral match.

[0219] FIG. 27A shows MS/MS spectra for the endogenously processed peptide epitope KPKRDGYMFL (bottom) and its corresponding synthetic peptide (top).

[0220] FIG. 27B shows Head-to-toe plot of spectral match.

[0221] FIG. 28A shows MS/MS spectra for the endogenously processed peptide epitope ESKImFATL (bottom) and its corresponding synthetic peptide (top).

[0222] FIG. 28B shows Head-to-toe plot of spectral match.

[0223] FIG. 29A shows representative induction of CD8+ responses with GATA3 neoORF specific peptide (FLT-mDC GATA3 Stim2 Multimer).

[0224] FIG. 29 B shows negative control with no induction of CD8+ responses in PBMC and dendritic cells.

[0225] FIG. 30A shows induction of antigen specific CD4 T cells with no peptide.

[0226] FIG. 30B shows induction of antigen specific CD4 T cells with GATA3 neoORF specific peptide.

[0227] FIGS. 31A-31D show GATA3 specific CD8+ T cells by multimer staining.

[0228] FIG. 31A shows GATA3 specific CD8+ T cells were observed at average of 1.16% positive after long term stimulation for healthy donor HD47.

[0229] FIG. 31B shows GATA3 specific CD8+ T cells were observed at average of 1.29%, positive after long term stimulation for healthy donor HD50.

[0230] FIG. 31C shows GATA3 specific CD8+ T cells were observed at average of 1.9% positive after long term stimulation for healthy donor HD51.

[0231] FIG. 31D shows GATA3 specific CD8+ T cells were observed at average of 4.5% positive after long term stimulation for healthy donor HD51 at a different concentration of peptide than in FIG. 31C.

[0232] FIG. 32 shows comparison of Caspase-3 positive fraction of live target cells. 4 different GATA3 induced healthy donor PBMC 1 to 4 were co-cultured with GATA3 mutation transduced HEK 293T cells (GATA3Trd) or non-transduced HEK 293T cells (NoTRd293T) as negative control group.

[0233] FIG. 33 shows significant difference between GATA3 transduced HEK293T cells and non-transduced HEK293T cells.

[0234] FIG. 34 shows CD107a expression difference of CD8+ T cells co-culture with GATA3 transduced HEK293T cells or non-transduced HEK293T cells.

[0235] FIG. 35 shows IFN-γ concentration difference in co-culture condition between GATA3 transduced HEK293T cells and non-transduced HEK293T cells with GATA3 induced T cells.

[0236] FIG. 36 shows overview of GATA3 specific TCR cloning. The details are described in Example 26.

[0237] FIG. 37 shows exemplary methods for generating GATA3 specific TCR transduced Jurkat and PBMC. The details are described in Example 26.

[0238] FIG. 38 shows overview of functional assay with TCR transduced Jurkat.

[0239] FIG. 39 shows GATA3 specific CD8+ T cell by multimer staining for sorting.

[0240] FIG. 40 shows GATA3 specific TCR construct for lenti-virus.

[0241] FIG. 41A shows multi-alignment of GATA3 TCR alpha sequence and wild type DNA sequence.

[0242] FIG. 41B shows multi-alignment of GATA3 TCR beta sequence and wild type DNA sequence.

[0243] FIG. 42 shows restriction enzyme digestion of GATA3 TCR plasmid with AfIII.

[0244] FIG. 43 shows GATA3 specific TCR transduced Jurkat stained with GATA3 multimer PE and GATA3 multimer BV650.

[0245] FIG. 44 shows GATA3 specific TCR peptide titration assay.

[0246] FIG. 45 shows IL-2 release assay of GATA3 specific TCR transduced Jurkat cells and GATA3 mutation transduced target cells.

[0247] FIG. 46 shows stereochemistry of exemplary GATA3 neo ORF peptide. The peptide consists of 14 amino acids and sequence of ESKIMFATLQRSSL. The peptide has a molecular formula of C₇₀H₁₁₉N₁₉O₂₂S and molecular weight of 1610.89 g/mol. The peptide is in the trifluoroacetic acid (TFA) salt form.

[0248] FIG. 47 shows stereochemistry of exemplary GATA3 neo ORF peptide. The peptide consists of 16 amino acids and sequence of KPKRDGYMFLKAESKI. The peptide has a molecular formula of C₈₇H₁₄₃N₂₃O₂₃S and molecular weight of 1911.30 g/mol. The peptide is in the trifluoroacetic acid (TFA) salt form.

[0249] FIG. 48 shows stereochemistry of exemplary GATA3 neo ORF peptide. The peptide consists of 18 amino acids and sequence of SMLTGPPARVPAVPFDLH. The peptide has a molecular formula of C₈₇H₁₃₇N₂₃O₂₃S and molecular weight of 1905.25 g/mol. The peptide is in the trifluoroacetic acid (TFA) salt form.

[0250] FIG. 49 shows stereochemistry of exemplary GATA3 neo ORF peptide. The peptide consists of 21 amino acids and sequence of EPCSMLTGPPARVPAVPFDLH. The peptide has a molecular formula of C₁₀₀H₁₅₆N₂₆O₂₈S₂ and molecular weight of 2234.62 g/mol. The peptide is in the trifluoroacetic acid (TFA) salt form.

[0251] FIG. 50 shows stereochemistry of exemplary GATA3 neo ORF peptide. The peptide consists of 25 amino acids and sequence of LHFCRSSIMKPKRDGYMFLKAESKI. The peptide has a molecular formula of C₁₃₄H₂₁₇N₃₇O₃₄S₃ and molecular weight of 2986.62 g/mol. The peptide is in the trifluoroacetic acid (TFA) salt form.

[0252] FIG. 51 shows stereochemistry of exemplary GATA3 neo ORF peptide. The peptide consists of 26 amino acids and sequence of GPPARVPAVPFDLHFCRSSIMKPKRD. The peptide has a molecular formula of C₁₃₁H₂₀₉N₃₉O₃₃S₂ and molecular weight of 2922.47 g/mol. The peptide is in the trifluoroacetic acid (TFA) salt form.

[0253] FIG. 52 shows stereochemistry of exemplary GATA3 neo ORF peptide. The peptide consists of 33 amino acids and sequence of KPKRDGYMFLKAESKIMFATLQRSSLWCLCSNH. The peptide has a molecular formula of C₁₇₃H₂₇₄N₄₈O₄₆S₄ and molecular weight of 3890.63 g/mol. The peptide is in the trifluoroacetic acid (TFA) salt form.

[0254] FIG. 53 shows BTK antigen peptide specific CD8⁺ T cell responses using PBMC samples from human donors.

[0255] FIG. 54 shows EGFR antigen peptide specific CD8⁺ T cell responses using PBMC samples from human donors.

### DETAILED DESCRIPTION

[0256] GATA3 is a gene that is highly expressed in breast cancer, and is one of the most frequently mutated genes in these cancers. The most common classes of mutations in this gene are insertions or deletions between nucleotides encoding amino acids 393 and 445 (the natural stop codon). When these shift the open reading frame to the +1 frame, they result in an extended novel reading frame (“neoORF”) that leads at least 61 and as many as 113 amino acids that are not normally expressed in healthy cells. The 61 amino acids are shared between all patients (conserved region), while each patient will have 0-52 additional amino acids (variable region). Epitopes that are processed and presented from this neoORF are therefore neoantigens that are shared between some or all patients that harbor this same class of mutations. The GATA3 neoORF appears to be an adverse prognostic factor in breast cancer. GATA3 wild-type is a highly expressed gene and the GATA3 neoORF retains high expression. The GATA3 neoORF is translated and is associated with increased risk of breast cancer.

[0257] In some embodiments, overlapping long peptides (OLPs) that cover the entire neoORF can be used for treating cancer. In some aspects, the OLPs described herein have been designed to include epitopes on the ends of peptides that simplify the process of processing and presentation (as only one cleavage event is necessary). In some aspects, short peptides (e.g., 9-11 amino acids) can be administered to a subject to treat cancer that bind to an MHC class I protein. The approaches described herein can be used to target many neoantigens without needing to select patients based on their HLA composition.

[0258] In some embodiments, peptides described herein can comprise a modification that may increase immunogenicity (e.g., lipidation). In some embodiments, a polynucleotide encoding a polypeptide encoded by the entire GATA3 neoORF (e.g., polybodies) is provided. In some embodiments, a cell-based therapy, such as engineered T cells expressing TCRs targeting specific epitopes can be used to treat a subject with cancer.

[0259] Synthetic long peptides (SLPs) that cover the common region of GATA3 protein are disclosed herein. These peptides are soluble in the formulations described herein and compatible with polyICLC for s.c. injections. High purities and synthesis yields of one or more of these peptides can be achieved by adopting pseudo-proline building blocks during the solid phase peptide synthesis (SPPS). Purification conditions of each of these peptides have been developed as well.

[0260] Described herein are new immunotherapeutic agents and uses thereof based on the discovery of neoantigens arising from mutational events unique to an individual's tumor. Accordingly, the present disclosure described herein provides peptides, polynucleotides encoding the peptides, and peptide binding agents that can be used, for example, to stimulate an immune response to a tumor associated antigen or neoepitope, to create an immunogenic composition or cancer vaccine for use in treating disease.

[0261] The following description and examples illustrate embodiments of the present disclosure in detail. It is to be understood that this present disclosure is not limited to the particular embodiments described herein and as such can vary. Those of skill in the art will recognize that there are numerous variations and modifications of this present disclosure, which are encompassed within its scope.

[0262] All terms are intended to be understood as they would be understood by a person skilled in the art. Unless defined otherwise, all technical and scientific terms used herein have the same meaning as commonly understood by one of ordinary skill in the art to which the disclosure pertains.

[0263] The section headings used herein are for organizational purposes only and are not to be construed as limiting the subject matter described.

[0264] Although various features of the present disclosure may be described in the context of a single embodiment, the features may also be provided separately or in any suitable combination. Conversely, although the present disclosure may be described herein in the context of separate embodiments for clarity, the present disclosure may also be implemented in a single embodiment.

[0265] The following definitions supplement those in the art and are directed to the current application and are not to be imputed to any related or unrelated case, e.g., to any commonly owned patent or application. Although any methods and materials similar or equivalent to those described herein can be used in the practice for testing of the present disclosure, the preferred materials and methods are described herein. Accordingly, the terminology used herein is for the purpose of describing particular embodiments only, and is not intended to be limiting.

### Definitions

[0266] The terminology used herein is for the purpose of describing particular cases only and is not intended to be limiting. In this application, the use of the singular includes the plural unless specifically stated otherwise. As used herein, the singular forms “a”, “an” and “the” are intended to include the plural forms as well, unless the context clearly indicates otherwise.

[0267] In this application, the use of “or” means “and/or” unless stated otherwise. The terms “and/or” and “any combination thereof” and their grammatical equivalents as used herein, can be used interchangeably. These terms can convey that any combination is specifically contemplated. Solely for illustrative purposes, the following phrases “A, B, and/or C” or “A, B, C, or any combination thereof” can mean “A individually; B individually; C individually; A and B; B and C; A and C; and A, B, and C.” The term “or” can be used conjunctively or disjunctively, unless the context specifically refers to a disjunctive use.

[0268] The term “about” or “approximately” can mean within an acceptable error range for the particular value as determined by one of ordinary skill in the art, which will depend in part on how the value is measured or determined, i.e., the limitations of the measurement system. For example, “about” can mean within 1 or more than 1 standard deviation, per the practice in the art. Alternatively, “about” can mean a range of up to 20%, up to 10%, up to 5%, or up to 1% of a given value. Alternatively, particularly with respect to biological systems or processes, the term can mean within an order of magnitude, within 5-fold, and more preferably within 2-fold, of a value. Where particular values are described in the application and claims, unless otherwise stated the term “about” meaning within an acceptable error range for the particular value should be assumed.

[0269] As used in this specification and claim(s), the words “comprising” (and any form of comprising, such as “comprise” and “comprises”), “having” (and any form of having, such as “have” and “has”), “including” (and any form of including, such as “includes” and “include”) or “containing” (and any form of containing, such as “contains” and “contain”) are inclusive or open-ended and do not exclude additional, unrecited elements or method steps. It is contemplated that any embodiment discussed in this specification can be implemented with respect to any method or composition of the present disclosure, and vice versa. Furthermore, compositions of the present disclosure can be used to achieve methods of the present disclosure.

[0270] Reference in the specification to “some embodiments,” “an embodiment,” “one embodiment” or “other embodiments” means that a particular feature, structure, or characteristic described in connection with the embodiments is included in at least some embodiments, but not necessarily all embodiments, of the present disclosures. To facilitate an understanding of the present disclosure, a number of terms and phrases are defined below.

[0271] “Major Histocompatibility Complex” or “MHC” is a cluster of genes that plays a role in control of the cellular interactions responsible for physiologic immune responses. In humans, the MHC complex is also known as the human leukocyte antigen (HLA) complex. For a detailed description of the MHC and HLA complexes, see, Paul, Fundamental Immunology, 3^{rd} Ed., Raven Press, New York (1993). “Proteins or molecules of the major histocompatibility complex (MHC)”, “MHC molecules”, “MHC proteins” or “HLA proteins” are to be understood as meaning proteins capable of binding peptides resulting from the proteolytic cleavage of protein antigens and representing potential lymphocyte epitopes, (e.g., T cell epitope and B cell epitope) transporting them to the cell surface and presenting them there to specific cells, in particular cytotoxic T-lymphocytes, T-helper cells, or B cells. The major histocompatibility complex in the genome comprises the genetic region whose gene products expressed on the cell surface are important for binding and presenting endogenous and/or foreign antigens and thus for regulating immunological processes. The major histocompatibility complex is classified into two gene groups coding for different proteins, namely molecules of MHC class I and molecules of MHC class II. The cellular biology and the expression patterns of the two MHC classes are adapted to these different roles.

[0272] “Human Leukocyte Antigen” or “HLA” is a human class I or class II Major Histocompatibility Complex (MHC) protein (see, e.g., Stites, et al., Immunology, 8^{th} Ed., Lange Publishing, Los Altos, Calif. (1994).

[0273] “Polypeptide”, “peptide” and their grammatical equivalents as used herein refer to a polymer of amino acid residues, typically L-amino acids, connected one to the other, typically by peptide bonds between the α-amino and carboxyl groups of adjacent amino acids. Polypeptides and peptides include, but are not limited to, “mutant peptides”, “neoantigen peptides” and “neoantigenic peptides”. Polypeptides or peptides can be a variety of lengths, either in their neutral (uncharged) forms or in forms which are salts, and either free of modifications such as glycosylation, side chain oxidation, or phosphorylation or containing these modifications, subject to the condition that the modification not destroy the biological activity of the polypeptides as herein described. A “mature protein” is a protein which is full-length and which, optionally, includes glycosylation or other modifications typical for the protein in a given cellular environment. Polypeptides and proteins disclosed herein (including functional portions and functional variants thereof) can comprise synthetic amino acids in place of one or more naturally-occurring amino acids. Such synthetic amino acids are known in the art, and include, for example, aminocyclohexane carboxylic acid, norleucine, α-amino n-decanoic acid, homoserine, S-acetylaminomethyl-cysteine, trans-3- and trans-4-hydroxyproline, 4-aminophenylalanine, 4-nitrophenylalanine, 4-chlorophenylalanine, 4-carboxyphenylalanine, 0-phenylserine O-hydroxyphenylalanine, phenylglycine, α-naphthylalanine, cyclohexylalanine, cyclohexylglycine, indoline-2-carboxylic acid, 1,2,3,4-tetrahydroisoquinoline-3-carboxylic acid, aminomalonic acid, aminomalonic acid monoamide, N′-benzyl-N′-methyl-lysine, N′,N′-dibenzyl-lysine, 6-hydroxylysine, ornithine, α-aminocyclopentane carboxylic acid, α-aminocyclohexane carboxylic acid, α-aminocycloheptane carboxylic acid, α-(2-amino-2-norbornane)-carboxylic acid, α,γ-diaminobutyric acid, α,β-diaminopropionic acid, homophenylalanine, and α-tert-butylglycine. The present disclosure further contemplates that expression of polypeptides described herein in an engineered cell can be associated with post-translational modifications of one or more amino acids of the polypeptide constructs. Non-limiting examples of post-translational modifications include phosphorylation, acylation including acetylation and formylation, glycosylation (including N-linked and O-linked), amidation, hydroxylation, alkylation including methylation and ethylation, ubiquitination, addition of pyrrolidone carboxylic acid, formation of disulfide bridges, sulfation, myristoylation, palmitoylation, isoprenylation, farnesylation, geranylation, glypiation, lipoylation and iodination.

[0274] A peptide or polypeptide may comprise at least one flanking sequence. The term “flanking sequence” as used herein refers to a fragment or region of a peptide that is not a part of an epitope.

[0275] An “immunogenic” peptide or an “immunogenic” epitope or “peptide epitope” is a peptide that comprises an allele-specific motif such that the peptide will bind an HLA molecule and induce a cell-mediated or humoral response, for example, cytotoxic T lymphocyte (CTL (e.g., CD8⁺)), helper T lymphocyte (Th (e.g., CD4⁺)) and/or B lymphocyte response. Thus, immunogenic peptides described herein are capable of binding to an appropriate HLA molecule and thereafter inducing a CTL (cytotoxic) response, or a HTL (and humoral) response, to the peptide.

[0276] “Neoantigen” means a class of tumor antigens which arise from tumor-specific changes in proteins. Neoantigens encompass, but are not limited to, tumor antigens which arise from, for example, substitution in the protein sequence, frame shift mutation, fusion polypeptide, in-frame deletion, insertion, expression of endogenous retroviral polypeptides, and tumor-specific overexpression of polypeptides.

[0277] The term “residue” refers to an amino acid residue or amino acid mimetic residue incorporated into a peptide or protein by an amide bond or amide bond mimetic, or nucleic acid (DNA or RNA) that encodes the amino acid or amino acid mimetic.

[0278] A “neoepitope”, “tumor specific neoepitope” or “tumor antigen” refers to an epitope or antigenic determinant region that is not present in a reference, such as a non-diseased cell, e.g., a non-cancerous cell or a germline cell, but is found in a diseased cell, e.g., a cancer cell. This includes situations where a corresponding epitope is found in a normal non-diseased cell or a germline cell but, due to one or more mutations in a diseased cell, e.g., a cancer cell, the sequence of the epitope is changed so as to result in the neoepitope. The term “neoepitope” as used herein refers to an antigenic determinant region within the peptide or neoantigenic peptide. A neoepitope may comprise at least one “anchor residue” and at least one “anchor residue flanking region.” A neoepitope may further comprise a “separation region.” The term “anchor residue” refers to an amino acid residue that binds to specific pockets on HLAs, resulting in specificity of interactions with HLAs. In some cases, an anchor residue may be at a canonical anchor position. In other cases, an anchor residue may be at a non-canonical anchor position. Neoepitopes may bind to HLA molecules through primary and secondary anchor residues protruding into the pockets in the peptide-binding grooves. In the peptide-binding grooves, specific amino acids compose pockets that accommodate the corresponding side chains of the anchor residues of the presented neoepitopes. Peptide-binding preferences exist among different alleles of both of HLA I and HLA II molecules. HLA class I molecules bind short neoepitopes, whose N- and C-terminal ends are anchored into the pockets located at the ends of the neoepitope binding groove. While the majority of the HLA class I binding neoepitopes are of about 9 amino acids, longer neoepitopes can be accommodated by the bulging of their central portion, resulting in binding neoepitopes of about 8 to 12 amino acids. Neoepitopes binding to HLA class II proteins are not constrained in size and can vary from about 16 to 25 amino acids. The neoepitope binding groove in the HLA class II molecules is open at both ends, which enables binding of peptides with relatively longer length. Though the core 9 amino acid residues long segment contributes the most to the recognition of the neoepitope, the anchor residue flanking regions are also important for the specificity of the peptide to the HLA class II allele. In some cases, the anchor residue flanking region is N-terminus residues. In another case, the anchor residue flanking region is C-terminus residues. In yet another case, the anchor residue flanking region is both N-terminus residues and C-terminus residues. In some cases, the anchor residue flanking region is flanked by at least two anchor residues. An anchor residue flanking region flanked by anchor residues is a “separation region.”

[0279] A “reference” can be used to correlate and compare the results obtained in the methods of the present disclosure from a tumor specimen. Typically the “reference” may be obtained on the basis of one or more normal specimens, in particular specimens which are not affected by a cancer disease, either obtained from a patient or one or more different individuals, for example, healthy individuals, in particular individuals of the same species. A “reference” can be determined empirically by testing a sufficiently large number of normal specimens.

[0280] An “epitope” is the collective features of a molecule, such as primary, secondary and tertiary peptide structure, and charge, that together form a site recognized by, for example, an immunoglobulin, T cell receptor, HLA molecule, or chimeric antigen receptor. Alternatively, an epitope can be defined as a set of amino acid residues which is involved in recognition by a particular immunoglobulin, or in the context of T cells, those residues necessary for recognition by T cell receptor proteins, chimeric antigen receptors, and/or Major Histocompatibility Complex (MHC) receptors. A “T cell epitope” is to be understood as meaning a peptide sequence which can be bound by the MHC molecules of class I or II in the form of a peptide-presenting MHC molecule or MHC complex and then, in this form, be recognized and bound by T cells, such as T-lymphocytes or T-helper cells. Epitopes can be prepared by isolation from a natural source, or they can be synthesized according to standard protocols in the art. Synthetic epitopes can comprise artificial amino acid residues, “amino acid mimetics,” such as D isomers of naturally-occurring L amino acid residues or non-naturally-occurring amino acid residues such as cyclohexylalanine. Throughout this disclosure, epitopes may be referred to in some cases as peptides or peptide epitopes. It is to be appreciated that proteins or peptides that comprise an epitope or an analog described herein as well as additional amino acid(s) are still within the bounds of the present disclosure. In certain embodiments, the peptide comprises a fragment of an antigen. In certain embodiments, there is a limitation on the length of a peptide of the present disclosure. The embodiment that is length-limited occurs when the protein or peptide comprising an epitope described herein comprises a region (i.e., a contiguous series of amino acid residues) having 100% identity with a native sequence. In order to avoid the definition of epitope from reading, e.g., on whole natural molecules, there is a limitation on the length of any region that has 100% identity with a native peptide sequence. Thus, for a peptide comprising an epitope described herein and a region with 100% identity with a native peptide sequence, the region with 100% identity to a native sequence generally has a length of: less than or equal to 600 amino acid residues, less than or equal to 500 amino acid residues, less than or equal to 400 amino acid residues, less than or equal to 250 amino acid residues, less than or equal to 100 amino acid residues, less than or equal to 85 amino acid residues, less than or equal to 75 amino acid residues, less than or equal to 65 amino acid residues, and less than or equal to 50 amino acid residues. In certain embodiments, an “epitope” described herein is comprised by a peptide having a region with less than 51 amino acid residues that has 100% identity to a native peptide sequence, in any increment down to 5 amino acid residues; for example 50, 49, 48, 47, 46, 45, 44, 43, 42, 41, 40, 39, 38, 37, 36, 35, 34, 33, 32, 31, 30, 29, 28, 27, 26, 25, 24, 23, 22, 21, 20, 19, 18, 17, 16, 15, 14, 13, 12, 11, 10, 9, 8, 7, 6, 5, 4, 3, 2 or 1 amino acid residues.

[0281] The nomenclature used to describe peptides or proteins follows the conventional practice wherein the amino group is presented to the left (the amino- or N-terminus) and the carboxyl group to the right (the carboxy- or C-terminus) of each amino acid residue. When amino acid residue positions are referred to in a peptide epitope they are numbered in an amino to carboxyl direction with position one being the residue located at the amino terminal end of the epitope, or the peptide or protein of which it can be a part. In the formula representing selected specific embodiments of the present disclosure, the amino- and carboxyl-terminal groups, although not specifically shown, are in the form they would assume at physiologic pH values, unless otherwise specified. In the amino acid structure formula, each residue is generally represented by standard three letter or single letter designations. The L-form of an amino acid residue is represented by a capital single letter or a capital first letter of a three-letter symbol, and the D-form for those amino acid residues having D-forms is represented by a lower case single letter or a lower case three letter symbol. However, when three letter symbols or full names are used without capitals, they can refer to L amino acid residues. Glycine has no asymmetric carbon atom and is simply referred to as “Gly” or “G”. The amino acid sequences of peptides set forth herein are generally designated using the standard single letter symbol. (A, Alanine; C, Cysteine; D, Aspartic Acid; E, Glutamic Acid; F, Phenylalanine; G, Glycine; H, Histidine; I, Isoleucine; K, Lysine; L, Leucine; M, Methionine; N, Asparagine; P, Proline; Q, Glutamine; R, Arginine; S, Serine; T, Threonine; V, Valine; W, Tryptophan; and Y, Tyrosine.)

[0282] The term “mutation” refers to a change of or difference in the nucleic acid sequence (nucleotide substitution, addition or deletion) compared to a reference. A “somatic mutation” can occur in any of the cells of the body except the germ cells (sperm and egg) and therefore are not passed on to children. These alterations can (but do not always) cause cancer or other diseases. In some embodiments, a mutation is a non-synonymous mutation. The term “non-synonymous mutation” refers to a mutation, for example, a nucleotide substitution, which does result in an amino acid change such as an amino acid substitution in the translation product. A “frameshift” occurs when a mutation disrupts the normal phase of a gene's codon periodicity (also known as “reading frame”), resulting in the translation of a non-native protein sequence. It is possible for different mutations in a gene to achieve the same altered reading frame.

[0283] A “conservative” amino acid substitution is one in which one amino acid residue is replaced with another amino acid residue having a similar side chain. Families of amino acid residues having similar side chains have been defined in the art, including basic side chains (e.g., lysine, arginine, histidine), acidic side chains (e.g., aspartic acid, glutamic acid), uncharged polar side chains (e.g., glycine, asparagine, glutamine, serine, threonine, tyrosine, cysteine), nonpolar side chains (e.g., alanine, valine, leucine, isoleucine, proline, phenylalanine, methionine, tryptophan), beta-branched side chains (e.g., threonine, valine, isoleucine) and aromatic side chains (e.g., tyrosine, phenylalanine, tryptophan, histidine). For example, substitution of a phenylalanine for a tyrosine is a conservative substitution. Methods of identifying nucleotide and amino acid conservative substitutions which do not eliminate peptide function are well-known in the art.

[0284] As used herein, the term “affinity” refers to a measure of the strength of binding between two members of a binding pair, for example, an HLA-binding peptide and a class I or II HLA. K_{D} is the dissociation constant and has units of molarity. The affinity constant is the inverse of the dissociation constant. An affinity constant is sometimes used as a generic term to describe this chemical entity. It is a direct measure of the energy of binding. Affinity may be determined experimentally, for example by surface plasmon resonance (SPR) using commercially available Biacore SPR units. Affinity may also be expressed as the inhibitory concentration 50 (IC₅₀), that concentration at which 50% of the peptide is displaced. Likewise, ln(IC₅₀) refers to the natural log of the IC₅₀. K_{off} refers to the off-rate constant, for example, for dissociation of an HLA-binding peptide and a class I or II HLA. Throughout this disclosure, “binding data” results can be expressed in terms of “IC₅₀.” IC₅₀ is the concentration of the tested peptide in a binding assay at which 50% inhibition of binding of a labeled reference peptide is observed. Given the conditions in which the assays are run (i.e., limiting HLA protein and labeled reference peptide concentrations), these values approximate K_{D} values. Assays for determining binding are well known in the art and are described in detail, for example, in PCT publications WO 94/20127 and WO 94/03205, and other publications such Sidney et al., Current Protocols in Immunology 18.3.1 (1998); Sidney, et al., J. Immunol. 154:247 (1995); and Sette, et al., Mol. Immunol. 31:813 (1994). Alternatively, binding can be expressed relative to binding by a reference standard peptide. For example, can be based on its IC₅₀, relative to the IC₅₀ of a reference standard peptide. Binding can also be determined using other assay systems including those using: live cells (e.g., Ceppellini et al., Nature 339:392 (1989); Christnick et al., Nature 352:67 (1991); Busch et al., Int. Immunol. 2:443 (1990); Hill et al., J. Immunol. 147:189 (1991); del Guercio et al., J. Immunol. 154:685 (1995)), cell free systems using detergent lysates (e.g., Cerundolo et al., J. Immunol. 21:2069 (1991)), immobilized purified MHC (e.g., Hill et al., J. Immunol. 152, 2890 (1994); Marshall et al., J. Immunol. 152:4946 (1994)), ELISA systems (e.g., Reay et al., EMBO J. 11:2829 (1992)), surface plasmon resonance (e.g., Khilko et al., J. Biol. Chem. 268:15425 (1993)); high flux soluble phase assays (Hammer et al., J. Exp. Med. 180:2353 (1994)), and measurement of class I MHC stabilization or assembly (e.g., Ljunggren et al., Nature 346:476 (1990); Schumacher et al., Cell 62:563 (1990); Townsend et al., Cell 62:285 (1990); Parker et al., J. Immunol. 149:1896 (1992)). “Cross-reactive binding” indicates that a peptide is bound by more than one HLA molecule; a synonym is degenerate binding.

[0285] The term “derived” and its grammatical equivalents when used to discuss an epitope is a synonym for “prepared” and its grammatical equivalents. A derived epitope can be isolated from a natural source, or it can be synthesized according to standard protocols in the art. Synthetic epitopes can comprise artificial amino acid residues “amino acid mimetics,” such as D isomers of natural occurring L amino acid residues or non-natural amino acid residues such as cyclohexylalanine. A derived or prepared epitope can be an analog of a native epitope.

[0286] A “native” or a “wild type” sequence refers to a sequence found in nature. Such a sequence can comprise a longer sequence in nature.

[0287] A “receptor” is to be understood as meaning a biological molecule or a molecule grouping capable of binding a ligand. A receptor may serve, to transmit information in a cell, a cell formation or an organism. The receptor comprises at least one receptor unit, for example, where each receptor unit may consist of a protein molecule. The receptor has a structure which complements that of a ligand and may complex the ligand as a binding partner. The information is transmitted in particular by conformational changes of the receptor following complexation of the ligand on the surface of a cell. In some embodiments, a receptor is to be understood as meaning in particular proteins of MHC classes I and II capable of forming a receptor/ligand complex with a ligand, in particular a peptide or peptide fragment of suitable length.

[0288] A “ligand” is to be understood as meaning a molecule which has a structure complementary to that of a receptor and is capable of forming a complex with this receptor. In some embodiments, a ligand is to be understood as meaning a peptide or peptide fragment which has a suitable length and suitable binding motifs in its amino acid sequence, so that the peptide or peptide fragment is capable of forming a complex with proteins of MHC class I or MHC class II.

[0289] In some embodiments, a “receptor/ligand complex” is also to be understood as meaning a “receptor/peptide complex” or “receptor/peptide fragment complex”, including a peptide- or peptide fragment-presenting MHC molecule of class I or of class II.

[0290] “Synthetic peptide” refers to a peptide that is obtained from a non-natural source, e.g., is man-made. Such peptides can be produced using such methods as chemical synthesis or recombinant DNA technology. “Synthetic peptides” include “fusion proteins”.

[0291] The term “motif” refers to a pattern of residues in an amino acid sequence of defined length, for example, a peptide of less than about 15 amino acid residues in length, or less than about 13 amino acid residues in length, for example, from about 8 to about 13 amino acid residues (e.g., 8, 9, 10, 11, 12, or 13) for a class I HLA motif and from about 6 to about 25 amino acid residues (e.g., 6, 7, 8, 9, 10, 11, 12, 13, 14, 15, 16, 17, 18, 19, 20, 21, 22, 23, 24, or 25) for a class II HLA motif, which is recognized by a particular HLA molecule. Motifs are typically different for each HLA protein encoded by a given human HLA allele. These motifs differ in their pattern of the primary and secondary anchor residues. In some embodiments, an MHC class I motif identifies a peptide of 9, 10, or 11 amino acid residues in length.

[0292] The term “naturally occurring” and its grammatical equivalents as used herein refer to the fact that an object can be found in nature. For example, a peptide or nucleic acid that is present in an organism (including viruses) and can be isolated from a source in nature and which has not been intentionally modified by man in the laboratory is naturally occurring.

[0293] According to the present disclosure, the term “vaccine” relates to a pharmaceutical preparation (pharmaceutical composition) or product that upon administration induces an immune response, for example, a cellular or humoral immune response, which recognizes and attacks a pathogen or a diseased cell such as a cancer cell. A vaccine may be used for the prevention or treatment of a disease. The term “individualized cancer vaccine” or “personalized cancer vaccine” concerns a particular cancer patient and means that a cancer vaccine is adapted to the needs or special circumstances of an individual cancer patient.

[0294] “Antigen processing” or “processing” and its grammatical equivalents refers to the degradation of a polypeptide or antigen into procession products, which are fragments of said polypeptide or antigen (e.g., the degradation of a polypeptide into peptides) and the association of one or more of these fragments (e.g., via binding) with MHC molecules for presentation by cells, for example, antigen presenting cells, to specific T cells.

[0295] “Antigen presenting cells” (APC) are cells which present peptide fragments of protein antigens in association with MHC molecules on their cell surface. Some APCs may activate antigen specific T cells. Professional antigen-presenting cells are very efficient at internalizing antigen, either by phagocytosis or by receptor-mediated endocytosis, and then displaying a fragment of the antigen, bound to a class II MHC molecule, on their membrane. The T cell recognizes and interacts with the antigen-class II MHC molecule complex on the membrane of the antigen presenting cell. An additional co-stimulatory signal is then produced by the antigen presenting cell, leading to activation of the T cell. The expression of co-stimulatory molecules is a defining feature of professional antigen-presenting cells. The main types of professional antigen-presenting cells are dendritic cells, which have the broadest range of antigen presentation, and are probably the most important antigen presenting cells, macrophages, B-cells, and certain activated epithelial cells. Dendritic cells (DCs) are leukocyte populations that present antigens captured in peripheral tissues to T cells via both MHC class II and I antigen presentation pathways. It is well known that dendritic cells are potent inducers of immune responses and the activation of these cells is a critical step for the induction of antitumoral immunity. Dendritic cells are conveniently categorized as “immature” and “mature” cells, which can be used as a simple way to discriminate between two well characterized phenotypes. However, this nomenclature should not be construed to exclude all possible intermediate stages of differentiation. Immature dendritic cells are characterized as antigen presenting cells with a high capacity for antigen uptake and processing, which correlates with the high expression of Fc receptor (FcR) and mannose receptor. The mature phenotype is typically characterized by a lower expression of these markers, but a high expression of cell surface molecules responsible for T cell activation such as class I and class II MHC, adhesion molecules (e.g., CD54 and CD11) and costimulatory molecules (e.g., CD40, CD80, CD86 and 4-1 BB).

[0296] The terms “identical” and its grammatical equivalents as used herein or “sequence identity” in the context of two nucleic acid sequences or amino acid sequences of polypeptides refers to the residues in the two sequences which are the same when aligned for maximum correspondence over a specified comparison window. A “comparison window”, as used herein, refers to a segment of at least about 20 contiguous positions, usually about 50 to about 200, more usually about 100 to about 150 in which a sequence may be compared to a reference sequence of the same number of contiguous positions after the two sequences are aligned optimally. Methods of alignment of sequences for comparison are well-known in the art. Optimal alignment of sequences for comparison may be conducted by the local homology algorithm of Smith and Waterman, Adv. Appl. Math., 2:482 (1981); by the alignment algorithm of Needleman and Wunsch, J. Mol. Biol., 48:443 (1970); by the search for similarity method of Pearson and Lipman, Proc. Nat. Acad. Sci. U.S.A., 85:2444 (1988); by computerized implementations of these algorithms (including, but not limited to CLUSTAL in the PC/Gene program by Intelligentics, Mountain View Calif., GAP, BESTFIT, BLAST, FASTA, and TFASTA in the Wisconsin Genetics Software Package, Genetics Computer Group (GCG), 575 Science Dr., Madison, Wis., U.S.A.); the CLUSTAL program is well described by Higgins and Sharp, Gene, 73:237-244 (1988) and Higgins and Sharp, CABIOS, 5:151-153 (1989); Corpet et al., Nucleic Acids Res., 16:10881-10890 (1988); Huang et al., Computer Applications in the Biosciences, 8:155-165 (1992); and Pearson et al., Methods in Molecular Biology, 24:307-331 (1994). Alignment is also often performed by inspection and manual alignment. In one class of embodiments, the polypeptides herein have at least 60%, 61%, 62%, 63%, 64%, 65%, 66%, 67%, 68%, 69%, 70%, 71%, 72%, 73%, 74%, 75%, 76%, 77%, 78%, 79%, 80%, 81%, 82%, 83%, 84%, 85%, 86%, 87%, 88%, 89%, 90%, 91%, 92%, 93%, 94%, 95%, 96%, 97%, 98%, 99% or 100% sequence identity to a reference polypeptide, or a fragment thereof, e.g., as measured by BLASTP (or CLUSTAL, or any other available alignment software) using default parameters. Similarly, nucleic acids can also be described with reference to a starting nucleic acid, e.g., they can have 50%, 60%, 70%, 75%, 80%, 85%, 90%, 98%, 99% or 100% sequence identity to a reference nucleic acid or a fragment thereof, e.g., as measured by BLASTN (or CLUSTAL, or any other available alignment software) using default parameters. When one molecule is said to have certain percentage of sequence identity with a larger molecule, it means that when the two molecules are optimally aligned, said percentage of residues in the smaller molecule finds a match residue in the larger molecule in accordance with the order by which the two molecules are optimally aligned.

[0297] The term “substantially identical” and its grammatical equivalents as applied to nucleic acid or amino acid sequences mean that a nucleic acid or amino acid sequence comprises a sequence that has at least 90% sequence identity or more, at least 95%, at least 98% and at least 99%, compared to a reference sequence using the programs described above, e.g., BLAST, using standard parameters. For example, the BLASTN program (for nucleotide sequences) uses as defaults a word length (W) of 11, an expectation (E) of 10, M=5, N=−4, and a comparison of both strands. For amino acid sequences, the BLASTP program uses as defaults a word length (W) of 3, an expectation (E) of 10, and the BLOSUM62 scoring matrix (see Henikoff & Henikoff, Proc. Natl. Acad. Sci. USA 89:10915 (1992)). Percentage of sequence identity is determined by comparing two optimally aligned sequences over a comparison window, wherein the portion of the polynucleotide sequence in the comparison window may comprise additions or deletions (i.e., gaps) as compared to the reference sequence (which does not comprise additions or deletions) for optimal alignment of the two sequences. The percentage is calculated by determining the number of positions at which the identical nucleic acid base or amino acid residue occurs in both sequences to yield the number of matched positions, dividing the number of matched positions by the total number of positions in the window of comparison and multiplying the result by 100 to yield the percentage of sequence identity. In embodiments, the substantial identity exists over a region of the sequences that is at least about 50 residues in length, over a region of at least about 100 residues, and in embodiments, the sequences are substantially identical over at least about 150 residues. In embodiments, the sequences are substantially identical over the entire length of the coding regions.

[0298] The term “vector” as used herein means a construct, which is capable of delivering, and usually expressing, one or more gene(s) or sequence(s) of interest in a host cell. Examples of vectors include, but are not limited to, viral vectors, naked DNA or RNA expression vectors, plasmid, cosmid, or phage vectors, DNA or RNA expression vectors associated with cationic condensing agents, and DNA or RNA expression vectors encapsulated in liposomes.

[0299] A polypeptide, antibody, polynucleotide, vector, cell, or composition which is “isolated” is a polypeptide, antibody, polynucleotide, vector, cell, or composition which is in a form not found in nature. Isolated polypeptides, antibodies, polynucleotides, vectors, cells, or compositions include those which have been purified to a degree that they are no longer in a form in which they are found in nature. In some embodiments, a polypeptide, antibody, polynucleotide, vector, cell, or composition which is isolated is substantially pure. In some embodiments, an “isolated polynucleotide” encompasses a PCR or quantitative PCR reaction comprising the polynucleotide amplified in the PCR or quantitative PCR reaction.

[0300] The term “isolated”, “biologically pure” or their grammatical equivalents refers to material which is substantially or essentially free from components which normally accompany the material as it is found in its native state. Thus, isolated peptides described herein do not contain some or all of the materials normally associated with the peptides in their in situ environment. An “isolated” epitope refers to an epitope that does not include the whole sequence of the antigen from which the epitope was derived. Typically the “isolated” epitope does not have attached thereto additional amino acid residues that result in a sequence that has 100% identity over the entire length of a native sequence. The native sequence can be a sequence such as a tumor-associated antigen from which the epitope is derived. Thus, the term “isolated” means that the material is removed from its original environment (e.g., the natural environment if it is naturally occurring). An “isolated” nucleic acid is a nucleic acid removed from its natural environment. For example, a naturally-occurring polynucleotide or peptide present in a living animal is not isolated, but the same polynucleotide or peptide, separated from some or all of the coexisting materials in the natural system, is isolated. Such a polynucleotide could be part of a vector, and/or such a polynucleotide or peptide could be part of a composition, and still be “isolated” in that such vector or composition is not part of its natural environment. Isolated RNA molecules include in vivo or in vitro RNA transcripts of the DNA molecules described herein, and further include such molecules produced synthetically.

[0301] The term “substantially purified” and its grammatical equivalents as used herein refer to a nucleic acid sequence, polypeptide, protein or other compound which is essentially free, i.e., is more than about 50% free of, more than about 70% free of, more than about 90% free of, the polynucleotides, proteins, polypeptides and other molecules that the nucleic acid, polypeptide, protein or other compound is naturally associated with.

[0302] The term “substantially pure” as used herein refers to material which is at least 50% pure (i.e., free from contaminants), at least 90% pure, at least 95% pure, at least 98% pure, or at least 99% pure.

[0303] The terms “polynucleotide”, “nucleotide”, “nucleic acid”, “polynucleic acid” or “oligonucleotide” and their grammatical equivalents are used interchangeably herein and refer to polymers of nucleotides of any length, and include DNA and RNA, for example, mRNA. Thus, these terms include double and single stranded DNA, triplex DNA, as well as double and single stranded RNA. It also includes modified, for example, by methylation and/or by capping, and unmodified forms of the polynucleotide. The term is also meant to include molecules that include non-naturally occurring or synthetic nucleotides as well as nucleotide analogs. The nucleic acid sequences and vectors disclosed or contemplated herein may be introduced into a cell by, for example, transfection, transformation, or transduction. The nucleotides can be deoxyribonucleotides, ribonucleotides, modified nucleotides or bases, and/or their analogs, or any substrate that can be incorporated into a polymer by DNA or RNA polymerase. In some embodiments, the polynucleotide and nucleic acid can be in vitro transcribed mRNA. In some embodiments, the polynucleotide that is administered using the methods of the present disclosure is mRNA.

[0304] “Transfection,” “transformation,” or “transduction” as used herein refer to the introduction of one or more exogenous polynucleotides into a host cell by using physical or chemical methods. Many transfection techniques are known in the art and include, for example, calcium phosphate DNA co-precipitation (see, e.g., Murray E. J. (ed.), Methods in Molecular Biology, Vol. 7, Gene Transfer and Expression Protocols, Humana Press (1991)); DEAE-dextran; electroporation; cationic liposome-mediated transfection; tungsten particle-facilitated microparticle bombardment (Johnston, Nature, 346: 776-777 (1990)); and strontium phosphate DNA co-precipitation (Brash et al., Mol. Cell Biol., 7: 2031-2034 (1987)). Phage or viral vectors can be introduced into host cells, after growth of infectious particles in suitable packaging cells, many of which are commercially available.

[0305] Nucleic acids and/or nucleic acid sequences are “homologous” when they are derived, naturally or artificially, from a common ancestral nucleic acid or nucleic acid sequence. Proteins and/or protein sequences are “homologous” when their encoding DNAs are derived, naturally or artificially, from a common ancestral nucleic acid or nucleic acid sequence. The homologous molecules can be termed homologs. For example, any naturally occurring proteins, as described herein, can be modified by any available mutagenesis method. When expressed, this mutagenized nucleic acid encodes a polypeptide that is homologous to the protein encoded by the original nucleic acid. Homology is generally inferred from sequence identity between two or more nucleic acids or proteins (or sequences thereof). The precise percentage of identity between sequences that is useful in establishing homology varies with the nucleic acid and protein at issue, but as little as 25% sequence identity is routinely used to establish homology. Higher levels of sequence identity, e.g., 30%, 40%, 50%, 60%, 70%, 80%, 90%, 95% or 99% or more can also be used to establish homology. Methods for determining sequence identity percentages (e.g., BLASTP and BLASTN using default parameters) are described herein and are generally available.

[0306] The term “subject” refers to any animal (e.g., a mammal), including, but not limited to, humans, non-human primates, canines, felines, rodents, and the like, which is to be the recipient of a particular treatment. Typically, the terms “subject” and “patient” are used interchangeably herein in reference to a human subject.

[0307] The terms “effective amount” or “therapeutically effective amount” or “therapeutic effect” refer to an amount of a therapeutic effective to “treat” a disease or disorder in a subject or mammal. The therapeutically effective amount of a drug has a therapeutic effect and as such can prevent the development of a disease or disorder; slow down the development of a disease or disorder; slow down the progression of a disease or disorder; relieve to some extent one or more of the symptoms associated with a disease or disorder; reduce morbidity and mortality; improve quality of life; or a combination of such effects.

[0308] The terms “treating” or “treatment” or “to treat” or “alleviating” or “to alleviate” refer to both (1) therapeutic measures that cure, slow down, lessen symptoms of, and/or halt progression of a diagnosed pathologic condition or disorder; and (2) prophylactic or preventative measures that prevent or slow the development of a targeted pathologic condition or disorder. Thus those in need of treatment include those already with the disorder; those prone to have the disorder; and those in whom the disorder is to be prevented.

[0309] “Pharmaceutically acceptable” refers to a generally non-toxic, inert, and/or physiologically compatible composition or component of a composition.

[0310] A “pharmaceutical excipient” or “excipient” comprises a material such as an adjuvant, a carrier, pH-adjusting and buffering agents, tonicity adjusting agents, wetting agents, preservatives, and the like. A “pharmaceutical excipient” is an excipient which is pharmaceutically acceptable.

### Neoantigens and Uses Thereof

[0311] One of the critical barriers to developing curative and tumor-specific immunotherapy is the identification and selection of highly specific and restricted tumor antigens to avoid autoimmunity. Tumor neoantigens, which arise as a result of genetic change (e.g., inversions, translocations, deletions, missense mutations, splice site mutations, etc.) within malignant cells, represent the most tumor-specific class of antigens. Neoantigens have rarely been used in cancer vaccine or immunogenic compositions due to technical difficulties in identifying them, selecting optimized antigens, and producing neoantigens for use in a vaccine or immunogenic composition. These problems may be addressed by: identifying mutations in neoplasias/tumors which are present at the DNA level in tumor but not in matched germline samples from a high proportion of subjects having cancer; analyzing the identified mutations with one or more peptide-MHC binding prediction algorithms to generate a plurality of neoantigen T cell epitopes that are expressed within the neoplasia/tumor and that bind to a high proportion of patient HLA alleles; and synthesizing the plurality of neoantigenic peptides selected from the sets of all neoantigen peptides and predicted binding peptides for use in a cancer vaccine or immunogenic composition suitable for treating a high proportion of subjects having cancer.

[0312] For example, translating peptide sequencing information into a therapeutic vaccine may include prediction of mutated peptides that can bind to HLA molecules of a high proportion of individuals. Efficiently choosing which particular mutations to utilize as immunogen requires the ability to predict which mutated peptides would efficiently bind to a high proportion of patient's HLA alleles. Recently, neural network based learning approaches with validated binding and non-binding peptides have advanced the accuracy of prediction algorithms for the major HLA-A and -B alleles. However, even using advanced neural network-based algorithms to encode HLA-peptide binding rules, several factors limit the power to predict peptides presented on HLA alleles.

[0313] Another example of translating peptide sequencing information into a therapeutic vaccine may include formulating the drug as a multi-epitope vaccine of long peptides. Targeting as many mutated epitopes as practically as possible takes advantage of the enormous capacity of the immune system, prevents the opportunity for immunological escape by down-modulation of an immune targeted gene product, and compensates for the known inaccuracy of epitope prediction approaches. Synthetic peptides provide a useful means to prepare multiple immunogens efficiently and to rapidly translate identification of mutant epitopes to an effective vaccine. Peptides can be readily synthesized chemically and easily purified utilizing reagents free of contaminating bacteria or animal substances. The small size allows a clear focus on the mutated region of the protein and also reduces irrelevant antigenic competition from other components (non-mutated protein or viral vector antigens).

[0314] Yet another example of translating peptide sequencing information into a therapeutic vaccine may include a combination with a strong vaccine adjuvant. Effective vaccines may require a strong adjuvant to initiate an immune response. For example, poly-ICLC, an agonist of TLR3 and the RNA helicase-domains of MDA5 and RIG3, has shown several desirable properties for a vaccine adjuvant. These properties include the induction of local and systemic activation of immune cells in vivo, production of stimulatory chemokines and cytokines, and stimulation of antigen-presentation by DCs. Furthermore, poly-ICLC can induce durable CD4⁺ and CD8⁺ responses in humans. Importantly, striking similarities in the upregulation of transcriptional and signal transduction pathways were seen in subjects vaccinated with poly-ICLC and in volunteers who had received the highly effective, replication-competent yellow fever vaccine. Furthermore, >90% of ovarian carcinoma patients immunized with poly-ICLC in combination with a NYESO-1 peptide vaccine (in addition to Montanide) showed induction of CD4⁺ and CD8⁺ T cell, as well as antibody responses to the peptide in a recent phase 1 study. At the same time, poly-ICLC has been extensively tested in more than 25 clinical trials to date and exhibited a relatively benign toxicity profile.

[0315] In some aspects, provided herein is a composition comprising: a first peptide comprising a first neoepitope of a protein and a second peptide comprising a second neoepitope of the same protein, a polynucleotide encoding the first peptide and the second peptide, one or more APCs comprising the first peptide and the second peptide, or a first T cell receptor (TCR) specific for the first neoepitope in complex with an HLA protein and a second TCR specific for the second neoepitope in complex with an HLA protein; wherein the first peptide is different from the second peptide, and wherein the first neoepitope comprises a mutation and the second neoepitope comprises the same mutation.

[0316] In some aspects, provided herein is a composition comprising: a first peptide comprising a first neoepitope of a region of a protein and a second peptide comprising a second neoepitope of the region of the same protein, wherein the first neoepitope and the second neoepitope comprise at least one amino acid of the region that is the same, a polynucleotide encoding the first peptide and the second peptide, on or more APCs comprising the first peptide and the second peptide, or a first T cell receptor (TCR) specific for the first neoepitope in complex with an HLA protein and a second TCR specific for the second neoepitope in complex with an HLA protein; wherein the first peptide is different from the second peptide, and wherein the first neoepitope comprises a first mutation and the second neoepitope comprises a second mutation.

[0317] In some embodiments, the first mutation and the second mutation are the same. In some embodiments, the first peptide and the second peptide are different molecules. In some embodiments, the first neoepitope comprises a first neoepitope of a region of the same protein, wherein the second neoepitope comprises a second neoepitope of the region of the same protein. In some embodiments, the first neoepitope and the second neoepitope comprise at least one amino acid of the region that is the same. In some embodiments, the region of the protein comprises at least 9, 10, 11, 12, 13, 14, 15, 16, 17, 18, 19, 20, 21, 22, 23, 24, 25, 26, 27, 28, 29, 30, 40, 50, 60, 70, 80, 90, 100, 150, 200, 250, 300, 350, 400, 450, 500, 600, 700, 800, 900, or 1,000 contiguous amino acids of the protein. In some embodiments, the region of the protein comprises at most 10, 11, 12, 13, 14, 15, 16, 17, 18, 19, 20, 21, 22, 23, 24, 25, 26, 27, 28, 29, 30, 40, 50, 60, 70, 80, 90, 100, 150, 200, 250, 300, 350, 400, 450, 500, 600, 700, 800, 900, or 1,000 contiguous amino acids of the protein. In some embodiments, the first neoepitope binds to a class I HLA protein to form a class I HLA-peptide complex. In some embodiments, the second neoepitope binds to a class II HLA protein to form a class II HLA-peptide complex. In some embodiments, the second neoepitope binds to a class I HLA protein to form a class I HLA-peptide complex. In some embodiments, the first neoepitope binds to a class II HLA protein to form a class II HLA-peptide complex. In some embodiments, the first neoepitope is a first neoepitope peptide processed from the first peptide and/or the second neoepitope is a second neoepitope peptide processed from the second peptide. In some embodiments, the first neoepitope is shorter in length than first peptide and/or the second neoepitope is shorter in length than second peptide. In some embodiments, the first neoepitope peptide is processed by an antigen presenting cell (APC) comprising the first peptide and/or the second neoepitope peptide is processed by an APC comprising the second peptide. In some embodiments, the first neoepitope activates CD8⁺ T cells. In some embodiments, the second neoepitope activates CD4⁺ T cells. In some embodiments, the second neoepitope activates CD8⁺ T cells. In some embodiments, the first neoepitope activates CD4⁺ T cells. In some embodiments, a TCR of a CD4⁺ T cell binds to a class II HLA-peptide complex comprising the first or second peptide. In some embodiments, a TCR of a CD8⁺ T cell binds to a class I HLA-peptide complex comprising the first or second peptide. In some embodiments, a TCR of a CD4⁺ T cell binds to a class I HLA-peptide complex comprising the first or second peptide. In some embodiments, a TCR of a CD8⁺ T cell binds to a class II HLA-peptide complex comprising the first or second peptide. In some embodiments, the one or more APCs comprise a first APC comprising the first peptide and a second APC comprising the second peptide. In some embodiments, the mutation is selected from the group consisting of a point mutation, a splice-site mutation, a frameshift mutation, a read-through mutation, a gene fusion mutation and any combination thereof. In some embodiments, the first neoepitope and the second neoepitope comprises a sequence encoded by a gene of Table 1 or 2. In some embodiments, the protein is encoded by a gene of Table 1 or 2. In some embodiments, the mutation is a mutation of column 2 of Table 1 or 2. In some embodiments, the protein is GATA3. In some embodiments, the first neoepitope and the second neoepitope comprises a sequence encoded by a gene of Table 34 or Table 36. In some embodiments, the protein is encoded by a gene of Table 34 or Table 36. In some embodiments, the mutation is a mutation of column 2 of Table 34 or Table 36. In some embodiments, the protein is BTK. In some embodiments, the first neoepitope and the second neoepitope comprises a sequence encoded by a gene of Table 40A-40D. In some embodiments, the protein is encoded by a gene of Table 3 or 35. In some embodiments, the mutation is a mutation of column 2 of Table 3 or 35. In some embodiments, the protein is EGFR. In some embodiments, a single polypeptide comprises the first peptide and the second peptide, or a single polynucleotide encodes the first peptide and the second peptide. In some embodiments, the first peptide and the second peptide are encoded by a sequence transcribed from a same transcription start site. In some embodiments, the first peptide is encoded by a sequence transcribed from a first transcription start site and the second peptide is encoded by a sequence transcribed from a second transcription start site. In some embodiments, the single polypeptide has a length of at least 18; 19; 20; 21; 22; 23; 24; 25; 26; 27; 28; 29; 30; 40; 50; 60; 70; 80; 90; 100; 150; 200; 250; 300; 350; 400; 450; 500; 600; 700; 800; 900; 1,000; 1,500; 2,000; 2,500; 3,000; 4,000; 5,000; 7,500; or 10,000 amino acids. In some embodiments, the polypeptide comprises a first sequence with at least 60%, 61%, 62%, 63%, 64%, 65%, 66%, 67%, 68%, 69%, 70%, 71%, 72%, 73%, 74%, 75%, 76%, 77%, 78%, 79%, 80%, 81%, 82%, 83%, 84%, 85%, 86%, 87%, 88%, 89%, 90%, 91%, 92%, 93%, 94%, 95%, 96%, 97%, 98%, or 99%, sequence identity to a first corresponding wild-type sequence; and a second sequence with at least 60%, 61%, 62%, 63%, 64%, 65%, 66%, 67%, 68%, 69%, 70%, 71%, 72%, 73%, 74%, 75%, 76%, 77%, 78%, 79%, 80%, 81%, 82%, 83%, 84%, 85%, 86%, 87%, 88%, 89%, 90%, 91%, 92%, 93%, 94%, 95%, 96%, 97%, 98%, or 99%, sequence identity to a corresponding second wild-type sequence. In some embodiments, the polypeptide comprises a first sequence of at least 8 or 9 contiguous amino acids with at least 60%, 61%, 62%, 63%, 64%, 65%, 66%, 67%, 68%, 69%, 70%, 71%, 72%, 73%, 74%, 75%, 76%, 77%, 78%, 79%, 80%, 81%, 82%, 83%, 84%, 85%, 86%, 87%, 88%, 89%, 90%, 91%, 92%, 93%, 94%, 95%, 96%, 97%, 98%, or 99%, sequence identity to a corresponding first wild-type sequence; and a second sequence of at least 16 or 17 contiguous amino acids with at least 60%, 61%, 62%, 63%, 64%, 65%, 66%, 67%, 68%, 69%, 70%, 71%, 72%, 73%, 74%, 75%, 76%, 77%, 78%, 79%, 80%, 81%, 82%, 83%, 84%, 85%, 86%, 87%, 88%, 89%, 90%, 91%, 92%, 93%, 94%, 95%, 96%, 97%, 98%, or 99%, sequence identity to a corresponding second wild-type sequence. In some embodiments, the second peptide is longer than the first peptide In some embodiments, the first peptide is longer than the second peptide. In some embodiments, the first peptide has a length of at least 9; 10; 11; 12; 13; 14; 15; 16; 17; 18; 19; 20; 21; 22; 23; 24; 25; 26; 27; 28; 29; 30; 40; 50; 60; 70; 80; 90; 100; 150; 200; 250; 300; 350; 400; 450; 500; 600; 700; 800; 900; 1,000; 1,500; 2,000; 2,500; 3,000; 4,000; 5,000; 7,500; or 10,000 amino acids. In some embodiments, the second peptide has a length of at least 17; 18; 19; 20; 21; 22; 23; 24; 25; 26; 27; 28; 29; 30; 40; 50; 60; 70; 80; 90; 100; 150; 200; 250; 300; 350; 400; 450; 500; 600; 700; 800; 900; 1,000; 1,500; 2,000; 2,500; 3,000; 4,000; 5,000; 7,500; or 10,000 amino acids. In some embodiments, the first peptide comprises a sequence of at least 9 contiguous amino acids with at least 60%, 61%, 62%, 63%, 64%, 65%, 66%, 67%, 68%, 69%, 70%, 71%, 72%, 73%, 74%, 75%, 76%, 77%, 78%, 79%, 80%, 81%, 82%, 83%, 84%, 85%, 86%, 87%, 88%, 89%, 90%, 91%, 92%, 93%, 94%, 95%, 96%, 97%, 98%, or 99% identity to a corresponding wild-type sequence. In some embodiments, the second peptide comprises a sequence of at least 17 contiguous amino acids with at least 60%, 61%, 62%, 63%, 64%, 65%, 66%, 67%, 68%, 69%, 70%, 71%, 72%, 73%, 74%, 75%, 76%, 77%, 78%, 79%, 80%, 81%, 82%, 83%, 84%, 85%, 86%, 87%, 88%, 89%, 90%, 91%, 92%, 93%, 94%, 95%, 96%, 97%, 98%, or 99% identity to a corresponding wild-type sequence. In some embodiments, the second neoepitope is longer than the first neoepitope. In some embodiments, the first neoepitope has a length of at least 8 amino acids. In some embodiments, the first neoepitope has a length of from 8 to 12 amino acids. In some embodiments, the first neoepitope comprises a sequence of at least 8 contiguous amino acids, wherein at least 2 of the 8 contiguous amino acids are different at corresponding positions of a wild-type sequence. In some embodiments, the second neoepitope has a length of at least 16 amino acids. In some embodiments, the second neoepitope has a length of from 16 to 25 amino acids. In some embodiments, the second neoepitope comprises a sequence of at least 16 contiguous amino acids, wherein at least 2 of the 16 contiguous amino acids are different at corresponding positions of a wild-type sequence.

[0318] In some embodiments, the first peptide comprises at least one an additional mutation. In some embodiments, one or more of the at least one additional mutation is not a mutation in the first neoepitope. In some embodiments, one or more of the at least one additional mutation is a mutation in the first neoepitope. In some embodiments, the second peptide comprises at least one additional mutation. In some embodiments, one or more of the at least one additional mutation is not a mutation in the second neoepitope. In some embodiments, one or more of the at least one additional mutation is a mutation in the second neoepitope. In some embodiments, the first peptide, the second peptide or both comprise at least one flanking sequence, wherein the at least one flanking sequence is upstream or downstream of the neoepitope. In some embodiments, the at least one flanking sequence has at least 60%, 61%, 62%, 63%, 64%, 65%, 66%, 67%, 68%, 69%, 70%, 71%, 72%, 73%, 74%, 75%, 76%, 77%, 78%, 79%, 80%, 81%, 82%, 83%, 84%, 85%, 86%, 87%, 88%, 89%, 90%, 91%, 92%, 93%, 94%, 95%, 96%, 97%, 98%, 99%, or 100% sequence identity to a corresponding wild-type sequence. In some embodiments, the at least one flanking sequence comprises a non-wild-type sequence. In some embodiments, the at least one flanking sequence is a N-terminus flanking sequence. In some embodiments, the at least one flanking sequence is a C-terminus flanking sequence. In some embodiments, the at least one flanking sequence of the first peptide has at least 60%, 61%, 62%, 63%, 64%, 65%, 66%, 67%, 68%, 69%, 70%, 71%, 72%, 73%, 74%, 75%, 76%, 77%, 78%, 79%, 80%, 81%, 82%, 83%, 84%, 85%, 86%, 87%, 88%, 89%, 90%, 91%, 92%, 93%, 94%, 95%, 96%, 97%, 98%, 99%, or 100% sequence identity to the at least one flanking sequence of the second peptide. In some embodiments, the at least one flanking region of the first peptide is different from the at least one flanking region of the second peptide. In some embodiments, the at least one flanking residue comprises the mutation. In some embodiments, the first neoepitope, the second neoepitope or both comprises at least one anchor residue. In some embodiments, the at least one anchor residue of the first neoepitope is at a canonical anchor position. In some embodiments, the at least one anchor residue of the first neoepitope is at a non-canonical anchor position. In some embodiments, the at least one anchor residue of the second neoepitope is at a canonical anchor position. In some embodiments, the at least one anchor residue of the second neoepitope is at a non-canonical anchor position. In some embodiments, the at least one anchor residue of the first neoepitope is different from the at least one anchor residue of the second neoepitope. In some embodiments, the at least one anchor residue is a wild-type residue. In some embodiments, the at least one anchor residue is a substitution. In some embodiments, the first neoepitope and/or the second neoepitope binds to an HLA protein with a greater affinity than a corresponding neoepitope without the substitution. In some embodiments, the first neoepitope and/or the second neoepitope binds to an HLA protein with a greater affinity than a corresponding wild-type sequence without the substitution. In some embodiments, at least one anchor residue does not comprise the mutation. In some embodiments, the first neoepitope, the second neoepitope or both comprise at least one anchor residue flanking region. In some embodiments, the neoepitope comprises at least one anchor residue. In some embodiments, the at least one anchor residues comprises at least two anchor residues. In some embodiments, the at least two anchor residues are separated by a separation region comprising at least 1 amino acid. In some embodiments, the at least one anchor residue flanking region is not within the separation region. In some embodiments, the at least one anchor residue flanking region is upstream of a N-terminal anchor residue of the at least two anchor residues downstream of a C-terminal anchor residue of the at least two anchor residue both (a) and (b).

[0319] In some embodiments, composition comprises an adjuvant. In some embodiments, the composition comprises one or more additional peptides, wherein the one or more additional peptides comprise a third neoepitope. In some embodiments, the first and/or second neoepitope binds to an HLA protein with a greater affinity than a corresponding wild-type sequence. In some embodiments, the first and/or second neoepitope binds to an HLA protein with a K_{D} or an IC₅₀ less than 1000 nM, 900 nM, 800 nM, 700 nM, 600 nM, 500 nM, 250 nM, 150 nM, 100 nM, 50 nM, 25 nM or 10 nM. In some embodiments, the first and/or second neoepitope binds to an HLA class I protein with a K_{D} or an IC₅₀ less than 1000 nM, 900 nM, 800 nM, 700 nM, 600 nM, 500 nM, 250 nM, 150 nM, 100 nM, 50 nM, 25 nM or 10 nM. In some embodiments, the first and/or second neoepitope binds to an HLA class II protein with a K_{D} or an IC₅₀ less than 1000 nM, 900 nM, 800 nM, 700 nM, 600 nM, 500 nM, 250 nM, 150 nM, 100 nM, 50 nM, 25 nM or 10 nM. In some embodiments, the first and/or second neoepitope binds to a protein encoded by an HLA allele expressed by a subject. In some embodiments, the mutation is not present in non-cancer cells of a subject. In some embodiments, the first and/or second neoepitope is encoded by a gene or an expressed gene of a subject's cancer cells. In some embodiments, the composition comprises a first T cell comprising the first TCR. In some embodiments, the composition comprises a second T cell comprising the second TCR. In some embodiments, the first TCR comprises a non-native intracellular domain and/or the second TCR comprises a non-native intracellular domain. In some embodiments, the first TCR is a soluble TCR and/or the second TCR is a soluble TCR. In some embodiments, the first and/or second T cell is a cytotoxic T cell. In some embodiments, the first and/or second T cell is a gamma delta T cell. In some embodiments, the first and/or second T cell is a helper T cell. In some embodiments, the first T cell is a T cell stimulated, expanded or induced with the first neoepitope and/or the second T cell is a T cell stimulated, expanded or induced with the second neoepitope. In some embodiments, the first and/or second T cell is an autologous T cell. In some embodiments, the first and/or second T cell is an allogenic T cell. In some embodiments, the first and/or second T cell is an engineered T cell. In some embodiments, the first and/or second T cell is a T cell of a cell line. In some embodiments, the first and/or second TCR binds to an HLA-peptide complex with a K_{D} or an IC₅₀ of less than 1000 nM, 900 nM, 800 nM, 700 nM, 600 nM, 500 nM, 250 nM, 150 nM, 100 nM, 50 nM, 25 nM or 10 nM. In some aspects, provided herein is a vector comprising a polynucleotide encoding a first and a second peptide described herein. In some embodiments, the polynucleotide is operably linked to a promoter. In some embodiments, the vector is a self-amplifying RNA replicon, plasmid, phage, transposon, cosmid, virus, or virion. In some embodiments, the vector is a viral vector. In some embodiments, the vector is derived from a retrovirus, lentivirus, adenovirus, adeno-associated virus, herpes virus, pox virus, alpha virus, vaccinia virus, hepatitis B virus, human papillomavirus or a pseudotype thereof. In some embodiments, the vector is a non-viral vector. In some embodiments, the non-viral vector is a nanoparticle, a cationic lipid, a cationic polymer, a metallic nanopolymer, a nanorod, a liposome, a micelle, a microbubble, a cell-penetrating peptide, or a liposphere.

[0320] In some aspects, provided herein is a pharmaceutical composition comprising: a composition described herein, or a vector described herein; and a pharmaceutically acceptable excipient.

[0321] In some embodiments, the plurality of cells is autologous cells. In some embodiments, the plurality of APC cells is autologous cells. In some embodiments, the plurality of T cells is autologous cells. In some embodiments, the pharmaceutical composition further comprises an immunomodulatory agent or an adjuvant. In some embodiments, the immunomodulatory agent is a cytokine. In some embodiments, the adjuvant is polyICLC. In some embodiments, the adjuvant is Hiltonol.

[0322] In some aspects, provided herein is a method of treating cancer, the method comprising administering to a subject in need thereof a pharmaceutical composition described herein.

[0323] In some aspects, provided herein is a method of preventing resistance to a cancer therapy, the method comprising administering to a subject in need thereof a pharmaceutical composition described herein.

[0324] In some aspects, provided herein is a method of inducing an immune response, the method comprising administering to a subject in need thereof a pharmaceutical composition described herein.

[0325] In some embodiments, the immune response is a humoral response. In some embodiments, the first peptide and the second peptide are administered simultaneously, separately or sequentially. In some embodiments, the first peptide is sequentially administered after the second peptide. In some embodiments, the second peptide is sequentially administered after the first peptide. In some embodiments, the first peptide is sequentially administered after a time period sufficient for the second peptide to activate the T cells. In some embodiments, the second peptide is sequentially administered after a time period sufficient for the first peptide to activate the T cells. In some embodiments, the first peptide is sequentially administered after the second peptide to restimulate the T cells. In some embodiments, the second peptide is sequentially administered after the first peptide to restimulate the T cells. In some embodiments, the first peptide is administered to stimulate the T cells and the second peptide is administered after the first peptide to restimulate the T cells. In some embodiments, the second peptide is administered to stimulate the T cells and the first peptide is administered after the second peptide to restimulate the T cells.

[0326] In some embodiments, the subject has cancer, wherein the cancer is selected from the group consisting of melanoma, ovarian cancer, lung cancer, prostate cancer, breast cancer, colorectal cancer, endometrial cancer, and chronic lymphocytic leukemia (CLL). In some embodiments, the cancer is a breast cancer that is resistant to anti-estrogen therapy, is an MSI breast cancer, is a metastatic breast cancer, is a Her2 negative breast cancer, is a Her2 positive breast cancer, is an ER negative breast cancer, is an ER positive breast cancer, is a PR positive breast cancer, is a PR negetive breast cancer or any combination thereof. In some embodiments, the breast cancer expresses an estrogen receptor with a mutation. In some embodiments, the subject has a breast cancer that is resistant to anti-estrogen therapy. In some embodiments, the breast cancer expresses an estrogen receptor with a mutation. In some embodiments, the subject has a CLL that is resistant to ibrutinib therapy. In some embodiments, the CLL expresses a Bruton tyrosine kinase with a mutation, such as a C481S mutation. In some embodiments, the subject has a lung cancer that is resistant to a tyrosine kinase inhibitor. In some embodiments, the lung cancer expresses an epidermal growth factor receptor (EGFR) with a mutation, such as a T790M mutation. In some embodiments, the plurality of APC cells comprising the first peptide and the plurality of APC cells comprising the second peptide are administered simultaneously, separately or sequentially. In some embodiments, the plurality of T cells comprising the first TCR and the plurality of T cells comprising the second TCR are administered simultaneously, separately or sequentially. In some embodiments, the method further comprises administering at least one additional therapeutic agent or modality. In some embodiments, the at least one additional therapeutic agent or modality is surgery, a checkpoint inhibitor, an antibody or fragment thereof, a chemotherapeutic agent, radiation, a vaccine, a small molecule, a T cell, a vector, and APC, a polynucleotide, an oncolytic virus or any combination thereof. In some embodiments, the at least one additional therapeutic agent is an anti-PD-1 agent and anti-PD-L1 agent, an anti-CTLA-4 agent, or an anti-CD40 agent. In some embodiments, the additional therapeutic agent is administered before, simultaneously, or after administering a pharmaceutical composition according described herein.

### Peptides

[0327] In aspects, the present disclosure provides isolated peptides that comprise a tumor specific mutation from Table 1 or 2. In aspects, the present disclosure provides isolated peptides that comprise a tumor specific mutation from Table 34. In aspects, the present disclosure provides isolated peptides that comprise a tumor specific mutation from Table 40A-40D. These peptides and polypeptides are referred to herein as “neoantigenic peptides” or “neoantigenic polypeptides”. “Polypeptide”, “peptide” and their grammatical equivalents as used herein refer to a polymer of amino acid residues, typically L-amino acids, connected one to the other, typically by peptide bonds between the α-amino and carboxyl groups of adjacent amino acids. Polypeptides and peptides include, but are not limited to, “mutant peptides”, “neoantigen peptides” and “neoantigenic peptides”, Polypeptides or peptides can be a variety of lengths, either in their neutral (uncharged) forms or in forms which are salts, and either free of modifications such as glycosylation, side chain oxidation, or phosphorylation or containing these modifications, subject to the condition that the modification not destroy the biological activity of the polypeptides as herein described. A peptide or polypeptide may comprise at least one flanking sequence. The term “flanking sequence” as used herein refers to a fragment or region of a peptide that is not a part of an epitope.

TABLE 1
lists GATA3 neoORF Peptides

| Type | Sequences |
|---|---|
| 8 mers | EPCSMLTG, PCSMLTGP, CSMLTGPP, SMLTGPPA, MLTGPPAR, LTGPPARV, TGPPARVP, |
| | GPPARVPA, PPARVPAV, PARVPAVP, ARVPAVPF, RVPAVPFD, VPAVPFDL, PAVPFDLH, |
| | AVPFDLHF, VPFDLHFC, PFDLHFCR, FDLHFCRS, DLHFCRSS, LHFCRSSI, HFCRSSIM, |
| | FCRSSIMK, CRSSIMKP, RSSIMKPK, SSIMKPKR, SIMKPKRD, IMKPKRDG, MKPKRDGY, |
| | KPKRDGYM, PKRDGYMF, KRDGYMFL, RDGYMFLK, DGYMFLKA, GYMFLKAE, |
| | YMFLKAES, MFLKAESK, FLKAESKI, LKAESKIM, KAESKIMF, AESKIMFA, ESKIMFAT, |
| | SKIMFATL, KIMFATLQ, IMFATLQR, MFATLQRS, FATLQRSS, ATLQRSSL, TLQRSSLW, |
| | LQRSSLWC, QRSSLWCL, RSSLWCLC, SSLWCLCS, SLWCLCSN |
| 9 mers | EPCSMLTGP, PCSMLTGPP, CSMLTGPPA, SMLTGPPAR, MLTGPPARV, LTGPPARVP, |
| | TGPPARVPA, GPPARVPAV, PPARVPAVP, PARVPAVPF, ARVPAVPFD, RVPAVPFDL, |
| | VPAVPFDLH, PAVPFDLHF, AVPFDLHFC, VPFDLHFCR, PFDLHFCRS, FDLHFCRSS, |
| | DLHFCRSSI, LHFCRSSIM, HFCRSSIMK, FCRSSIMKP, CRSSIMKPK, RSSIMKPKR, |
| | SSIMKPKRD, SIMKPKRDG, IMKPKRDGY, MKPKRDGYM, KPKRDGYMF, PKRDGYMFL, |
| | KRDGYMFLK, RDGYMFLKA, DGYMFLKAE, GYMFLKAES, YMFLKAESK, MFLKAESKI, |
| | FLKAESKIM, LKAESKIMF, KAESKIMFA, AESKIMFAT, ESKIMFATL, SKIMFATLQ, |
| | KIMFATLQR, IMFATLQRS, MFATLQRSS, FATLQRSSL, ATLQRSSLW, TLQRSSLWC, |
| | LQRSSLWCL, QRSSLWCLC, RSSLWCLCS, SSLWCLCSN, SLWCLCSNH |
| 10 mers | EPCSMLTGPP, PCSMLTGPPA, CSMLTGPPAR, SMLTGPPARV, MLTGPPARVP, |
| | LTGPPARVPA, TGPPARVPAV, GPPARVPAVP, PPARVPAVPF, PARVPAVPFD, |
| | ARVPAVPFDL, RVPAVPFDLH, VPAVPFDLHF, PAVPFDLHFC, AVPFDLHFCR, |
| | VPFDLHFCRS, PFDLHFCRSS, FDLHFCRSSI, DLHFCRSSIM, LHFCRSSIMK, |
| | HFCRSSIMKP, FCRSSIMKPK, CRSSIMKPKR, RSSIMKPKRD, SSIMKPKRDG, |
| | SIMKPKRDGY, IMKPKRDGYM, MKPKRDGYMF, KPKRDGYMFL, PKRDGYMFLK, |
| | KRDGYMFLKA, RDGYMFLKAE, DGYMFLKAES, GYMFLKAESK, YMFLKAESKI, |
| | MFLKAESKIM, FLKAESKIMF, LKAESKIMFA, KAESKIMFAT, AESKIMFATL, |
| | ESKIMFATLQ, SKIMFATLQR, KIMFATLQRS, IMFATLQRSS, MFATLQRSSL, |
| | FATLQRSSLW, ATLQRSSLWC, TLQRSSLWCL, LQRSSLWCLC, QRSSLWCLCS, |
| | RSSLWCLCSN, SSLWCLCSNH, SLWCLCSNH |
| 11 mers | EPCSMLTGPPA, PCSMLTGPPAR, CSMLTGPPARV, SMLTGPPARVP, MLTGPPARVPA, |
| | LTGPPARVPAV, TGPPARVPAVP, GPPARVPAVPF, PPARVPAVPFD, PARVPAVPFDL, |
| | ARVPAVPFDLH, RVPAVPFDLHF, VPAVPFDLHFC, PAVPFDLHFCR, AVPFDLHFCRS, |
| | VPFDLHFCRSS, PFDLHFCRSSI, FDLHFCRSSIM, DLHFCRSSIMK, LHFCRSSIMKP, |
| | HFCRSSIMKPK, FCRSSIMKPKR, CRSSIMKPKRD, RSSIMKPKRDG, SSIMKPKRDGY, |
| | SIMKPKRDGYM, IMKPKRDGYMF, MKPKRDGYMFL, KPKRDGYMFLK, |
| | PKRDGYMFLKA, KRDGYMFLKAE, RDGYMFLKAES, DGYMFLKAESK, GYMFLKAESKI, |
| | YMFLKAESKIM, MFLKAESKIMF, FLKAESKIMFA, LKAESKIMFAT, KAESKIMFATL, |
| | AESKIMFATLQ, ESKIMFATLQR, SKIMFATLQRS, KIMFATLQRSS, IMFATLQRSSL, |
| | MFATLQRSSLW, FATLQRSSLWC, ATLQRSSLWCL, TLQRSSLWCLC, LQRSSLWCLCS, |
| | QRSSLWCLCSN, RSSLWCLCSNH |
| 12 mers | EPCSMLTGPPAR, PCSMLTGPPARV, CSMLTGPPARVP, SMLTGPPARVPA, |
| | MLTGPPARVPAV, LTGPPARVPAVP, TGPPARVPAVPF, GPPARVPAVPFD, |
| | PPARVPAVPFDL, PARVPAVPFDLH, ARVPAVPFDLHF, RVPAVPFDLHFC, |
| | VPAVPFDLHFCR, PAVPFDLHFCRS, AVPFDLHFCRSS, VPFDLHFCRSSI, PFDLHFCRSSIM, |
| | FDLHFCRSSIMK, DLHFCRSSIMKP, LHFCRSSIMKPK, HFCRSSIMKPKR, FCRSSIMKPKRD, |
| | CRSSIMKPKRDG, RSSIMKPKRDGY, SSIMKPKRDGYM, SIMKPKRDGYMF, |
| | IMKPKRDGYMFL, MKPKRDGYMFLK, KPKRDGYMFLKA, PKRDGYMFLKAE, |
| | KRDGYMFLKAES, RDGYMFLKAESK, DGYMFLKAESKI, GYMFLKAESKIM, |
| | YMFLKAESKIMF, MFLKAESKIMFA, FLKAESKIMFAT, LKAESKIMFATL, |
| | KAESKIMFATLQ, AESKIMFATLQR, ESKIMFATLQRS, SKIMFATLQRSS, KIMFATLQRSSL, |
| | IMFATLQRSSLW, MFATLQRSSLWC, FATLQRSSLWCL, ATLQRSSLWCLC, |
| | TLQRSSLWCLCS, LQRSSLWCLCSN, QRSSLWCLCSNH |
| 13 mers | EPCSMLTGPPARV, PCSMLTGPPARVP, CSMLTGPPARVPA, SMLTGPPARVPAV, |
| | MLTGPPARVPAVP, LTGPPARVPAVPF, TGPPARVPAVPFD, GPPARVPAVPFDL, |
| | PPARVPAVPFDLH, PARVPAVPFDLHF, ARVPAVPFDLHFC, RVPAVPFDLHFCR, |
| | VPAVPFDLHFCRS, PAVPFDLHFCRSS, AVPFDLHFCRSSI, VPFDLHFCRSSIM, |
| | PFDLHFCRSSIMK, FDLHFCRSSIMKP, DLHFCRSSIMKPK, LHFCRSSIMKPKR, |
| | HFCRSSIMKPKRD, FCRSSIMKPKRDG, CRSSIMKPKRDGY, RSSIMKPKRDGYM, |
| | SSIMKPKRDGYMF, SIMKPKRDGYMFL, IMKPKRDGYMFLK, MKPKRDGYMFLKA, |
| | KPKRDGYMFLKAE, PKRDGYMFLKAES, KRDGYMFLKAESK, RDGYMFLKAESKI, |
| | DGYMFLKAESKIM, GYMFLKAESKIMF, YMFLKAESKIMFA, MFLKAESKIMFAT, |
| | FLKAESKIMFATL, LKAESKIMFATLQ, KAESKIMFATLQR, AESKIMFATLQRS, |
| | ESKIMFATLQRSS, SKIMFATLQRSSL, KIMFATLQRSSLW, IMFATLQRSSLWC, |
| | MFATLQRSSLWCL, FATLQRSSLWCLC, ATLQRSSLWCLCS, TLQRSSLWCLCSN, |
| | LQRSSLWCLCSNH |
| 14 mers | EPCSMLTGPPARVP, PCSMLTGPPARVPA, CSMLTGPPARVPAV, SMLTGPPARVPAVP, |
| | MLTGPPARVPAVPF, LTGPPARVPAVPFD, TGPPARVPAVPFDL, GPPARVPAVPFDLH, |
| | PPARVPAVPFDLHF, PARVPAVPFDLHFC, ARVPAVPFDLHFCR, RVPAVPFDLHFCRS, |
| | VPAVPFDLHFCRSS, PAVPFDLHFCRSSI, AVPFDLHFCRSSIM, VPFDLHFCRSSIMK, |
| | PFDLHFCRSSIMKP, FDLHFCRSSIMKPK, DLHFCRSSIMKPKR, LHFCRSSIMKPKRD, |
| | HFCRSSIMKPKRDG, FCRSSIMKPKRDGY, CRSSIMKPKRDGYM, RSSIMKPKRDGYMF, |
| | SSIMKPKRDGYMFL, SIMKPKRDGYMFLK, IMKPKRDGYMFLKA, MKPKRDGYMFLKAE, |
| | KPKRDGYMFLKAES, PKRDGYMFLKAESK, KRDGYMFLKAESKI, RDGYMFLKAESKIM, |
| | DGYMFLKAESKIMF, GYMFLKAESKIMFA, YMFLKAESKIMFAT, MFLKAESKIMFATL, |
| | FLKAESKIMFATLQ, LKAESKIMFATLQR, KAESKIMFATLQRS, AESKIMFATLQRSS, |
| | ESKIMFATLQRSSL, SKIMFATLQRSSLW, KIMFATLQRSSLWC, IMFATLQRSSLWCL, |
| | MFATLQRSSLWCLC, FATLQRSSLWCLCS, ATLQRSSLWCLCSN, TLQRSSLWCLCSNH |
| 15 mers | EPCSMLTGPPARVPA, PCSMLTGPPARVPAV, CSMLTGPPARVPAVP, |
| | SMLTGPPARVPAVPF, MLTGPPARVPAVPFD, LTGPPARVPAVPFDL, |
| | TGPPARVPAVPFDLH, GPPARVPAVPFDLHF, PPARVPAVPFDLHFC, PARVPAVPFDLHFCR, |
| | ARVPAVPFDLHFCRS, RVPAVPFDLHFCRSS, VPAVPFDLHFCRSSI, PAVPFDLHFCRSSIM, |
| | AVPFDLHFCRSSIMK. VPFDLHFCRSSIMKP, PFDLHFCRSSIMKPK, FDLHFCRSSIMKPKR, |
| | DLHFCRSSIMKPKRD, LHFCRSSIMKPKRDG, HFCRSSIMKPKRDGY, |
| | FCRSSIMKPKRDGYM, CRSSIMKPKRDGYMF, RSSIMKPKRDGYMFL, |
| | SSIMKPKRDGYMFLK, SIMKPKRDGYMFLKA, IMKPKRDGYMFLKAE, |
| | MKPKRDGYMFLKAES, KPKRDGYMFLKAESK, PKRDGYMFLKAESKI, |
| | KRDGYMFLKAESKIM, RDGYMFLKAESKIMF, DGYMFLKAESKIMFA, |
| | GYMFLKAESKIMFAT, YMFLKAESKIMFATL, MFLKAESKIMFATLQ, |
| | FLKAESKIMFATLQR, LKAESKIMFATLQRS, KAESKIMFATLQRSS, AESKIMFATLQRSSL, |
| | ESKIMFATLQRSSLW, SKIMFATLQRSSLWC, KIMFATLQRSSLWCL, |
| | IMFATLQRSSLWCLC, MFATLQRSSLWCLCS, FATLQRSSLWCLCSN, |
| | ATLQRSSLWCLCSNH |
| 16 mers | EPCSMLTGPPARVPAV, PCSMLTGPPARVPAVP, CSMLTGPPARVPAVPF, |
| | SMLTGPPARVPAVPFD, MLTGPPARVPAVPFDL, LTGPPARVPAVPFDLH, |
| | TGPPARVPAVPFDLHF, GPPARVPAVPFDLHFC, PPARVPAVPFDLHFCR, |
| | PARVPAVPFDLHFCRS, ARVPAVPFDLHFCRSS, RVPAVPFDLHFCRSSI, |
| | VPAVPFDLHFCRSSIM, PAVPFDLHFCRSSIMK, AVPFDLHFCRSSIMKP, |
| | VPFDLHFCRSSIMKPK, PFDLHFCRSSIMKPKR, FDLHFCRSSIMKPKRD, |
| | DLHFCRSSIMKPKRDG, LHFCRSSIMKPKRDGY, HFCRSSIMKPKRDGYM, |
| | FCRSSIMKPKRDGYMF, CRSSIMKPKRDGYMFL, RSSIMKPKRDGYMFLK, |
| | SSIMKPKRDGYMFLKA, SIMKPKRDGYMFLKAE, IMKPKRDGYMFLKAES, |
| | MKPKRDGYMFLKAESK, KPKRDGYMFLKAESKI, PKRDGYMFLKAESKIM, |
| | KRDGYMFLKAESKIMF, RDGYMFLKAESKIMFA, DGYMFLKAESKIMFAT, |
| | GYMFLKAESKIMFATL, YMFLKAESKIMFATLQ, MFLKAESKIMFATLQR, |
| | FLKAESKIMFATLQRS, LKAESKIMFATLQRSS, KAESKIMFATLQRSSL, |
| | AESKIMFATLQRSSLW, ESKIMFATLQRSSLWC, SKIMFATLQRSSLWCL, |
| | KIMFATLQRSSLWCLC, IMFATLQRSSLWCLCS, MFATLQRSSLWCLCSN, |
| | FATLQRSSLWCLCSNH |
| 17 mers | EPCSMLTGPPARVPAVP, PCSMLTGPPARVPAVPF, CSMLTGPPARVPAVPFD, |
| | SMLTGPPARVPAVPFDL, MLTGPPARVPAVPFDLH, LTGPPARVPAVPFDLHF, |
| | TGPPARVPAVPFDLHFC, GPPARVPAVPFDLHFCR, PPARVPAVPFDLHFCRS, |
| | PARVPAVPFDLHFCRSS, ARVPAVPFDLHFCRSSI, RVPAVPFDLHFCRSSIM, |
| | VPAVPFDLHFCRSSIMK, PAVPFDLHFCRSSIMKP, AVPFDLHFCRSSIMKPK, |
| | VPFDLHFCRSSIMKPKR, PFDLHFCRSSIMKPKRD, FDLHFCRSSIMKPKRDG, |
| | DLHFCRSSIMKPKRDGY, LHFCRSSIMKPKRDGYM, HFCRSSIMKPKRDGYMF, |
| | FCRSSIMKPKRDGYMFL, CRSSIMKPKRDGYMFLK, RSSIMKPKRDGYMFLKA, |
| | SSIMKPKRDGYMFLKAE, SIMKPKRDGYMFLKAES, IMKPKRDGYMFLKAESK, |
| | MKPKRDGYMFLKAESKI, KPKRDGYMFLKAESKIM, PKRDGYMFLKAESKIMF, |
| | KRDGYMFLKAESKIMFA, RDGYMFLKAESKIMFAT, DGYMFLKAESKIMFATL, |
| | GYMFLKAESKIMFATLQ, YMFLKAESKIMFATLQR, MFLKAESKIMFATLQRS, |
| | FLKAESKIMFATLQRSS, LKAESKIMFATLQRSSL, KAESKIMFATLQRSSLW, |
| | AESKIMFATLQRSSLWC, ESKIMFATLQRSSLWCL, SKIMFATLQRSSLWCLC, |
| | KIMFATLQRSSLWCLCS, IMFATLQRSSLWCLCSN, MFATLQRSSLWCLCSNH |
| 18 mers | EPCSMLTGPPARVPAVPF, PCSMLTGPPARVPAVPFD, CSMLTGPPARVPAVPFDL, |
| | SMLTGPPARVPAVPFDLH, MLTGPPARVPAVPFDLHF, LTGPPARVPAVPFDLHFC, |
| | TGPPARVPAVPFDLHFCR, GPPARVPAVPFDLHFCRS, PPARVPAVPFDLHFCRSS, |
| | PARVPAVPFDLHFCRSSI, ARVPAVPFDLHFCRSSIM, RVPAVPFDLHFCRSSIMK, |
| | VPAVPFDLHFCRSSIMKP, PAVPFDLHFCRSSIMKPK, AVPFDLHFCRSSIMKPKR, |
| | VPFDLHFCRSSIMKPKRD, PFDLHFCRSSIMKPKRDG, FDLHFCRSSIMKPKRDGY, |
| | DLHFCRSSIMKPKRDGYM, LHFCRSSIMKPKRDGYMF, HFCRSSIMKPKRDGYMFL, |
| | FCRSSIMKPKRDGYMFLK, CRSSIMKPKRDGYMFLKA, RSSIMKPKRDGYMFLKAE, |
| | SSIMKPKRDGYMFLKAES, SIMKPKRDGYMFLKAESK, IMKPKRDGYMFLKAESKI, |
| | MKPKRDGYMFLKAESKIM, KPKRDGYMFLKAESKIMF, PKRDGYMFLKAESKIMFA, |
| | KRDGYMFLKAESKIMFAT, RDGYMFLKAESKIMFATL, DGYMFLKAESKIMFATLQ, |
| | GYMFLKAESKIMFATLQR, YMFLKAESKIMFATLQRS, MFLKAESKIMFATLQRSS, |
| | FLKAESKIMFATLQRSSL, LKAESKIMFATLQRSSLW, KAESKIMFATLQRSSLWC, |
| | AESKIMFATLQRSSLWCL, ESKIMFATLQRSSLWCLC, SKIMFATLQRSSLWCLCS, |
| | KIMFATLQRSSLWCLCSN, IMFATLQRSSLWCLCSNH |
| 19 mers | EPCSMLTGPPARVPAVPFD, PCSMLTGPPARVPAVPFDL, CSMLTGPPARVPAVPFDLH, |
| | SMLTGPPARVPAVPFDLHF, MLTGPPARVPAVPFDLHFC, LTGPPARVPAVPFDLHFCR, |
| | TGPPARVPAVPFDLHFCRS, GPPARVPAVPFDLHFCRSS, PPARVPAVPFDLHFCRSSI, |
| | PARVPAVPFDLHFCRSSIM, ARVPAVPFDLHFCRSSIMK, RVPAVPFDLHFCRSSIMKP, |
| | VPAVPFDLHFCRSSIMKPK, PAVPFDLHFCRSSIMKPKR, AVPFDLHFCRSSIMKPKRD, |
| | VPFDLHFCRSSIMKPKRDG, PFDLHFCRSSIMKPKRDGY, FDLHFCRSSIMKPKRDGYM, |
| | DLHFCRSSIMKPKRDGYMF, LHFCRSSIMKPKRDGYMFL, HFCRSSIMKPKRDGYMFLK, |
| | FCRSSIMKPKRDGYMFLKA, CRSSIMKPKRDGYMFLKAE, RSSIMKPKRDGYMFLKAES, |
| | SSIMKPKRDGYMFLKAESK, SIMKPKRDGYMFLKAESKI, IMKPKRDGYMFLKAESKIM, |
| | MKPKRDGYMFLKAESKIMF, KPKRDGYMFLKAESKIMFA, PKRDGYMFLKAESKIMFAT, |
| | KRDGYMFLKAESKIMFATL, RDGYMFLKAESKIMFATLQ, DGYMFLKAESKIMFATLQR, |
| | GYMFLKAESKIMFATLQRS, YMFLKAESKIMFATLQRSS, MFLKAESKIMFATLQRSSL, |
| | FLKAESKIMFATLQRSSLW, LKAESKIMFATLQRSSLWC, KAESKIMFATLQRSSLWCL, |
| | AESKIMFATLQRSSLWCLC, ESKIMFATLQRSSLWCLCS, SKIMFATLQRSSLWCLCSN, |
| | KIMFATLQRSSLWCLCSNH |
| 20 mers | EPCSMLTGPPARVPAVPFDL, PCSMLTGPPARVPAVPFDLH, CSMLTGPPARVPAVPFDLHF, |
| | SMLTGPPARVPAVPFDLHFC, MLTGPPARVPAVPFDLHFCR, LTGPPARVPAVPFDLHFCRS, |
| | TGPPARVPAVPFDLHFCRSS, GPPARVPAVPFDLHFCRSSI, PPARVPAVPFDLHFCRSSIM, |
| | PARVPAVPFDLHFCRSSIMK, ARVPAVPFDLHFCRSSIMKP, RVPAVPFDLHFCRSSIMKPK, |
| | VPAVPFDLHFCRSSIMKPKR, PAVPFDLHFCRSSIMKPKRD, AVPFDLHFCRSSIMKPKRDG, |
| | VPFDLHFCRSSIMKPKRDGY, PFDLHFCRSSIMKPKRDGYM, FDLHFCRSSIMKPKRDGYMF, |
| | DLHFCRSSIMKPKRDGYMFL, LHFCRSSIMKPKRDGYMFLK, |
| | HFCRSSIMKPKRDGYMFLKA, FCRSSIMKPKRDGYMFLKAE, |
| | CRSSIMKPKRDGYMFLKAES, RSSIMKPKRDGYMFLKAESK, SSIMKPKRDGYMFLKAESKI, |
| | SIMKPKRDGYMFLKAESKIM, IMKPKRDGYMFLKAESKIMF, |
| | MKPKRDGYMFLKAESKIMFA, KPKRDGYMFLKAESKIMFAT, |
| | PKRDGYMFLKAESKIMFATL, KRDGYMFLKAESKIMFATLQ, |
| | RDGYMFLKAESKIMFATLQR, DGYMFLKAESKIMFATLQRS, |
| | GYMFLKAESKIMFATLQRSS, YMFLKAESKIMFATLQRSSL, MFLKAESKIMFATLQRSSLW, |
| | FLKAESKIMFATLQRSSLWC, LKAESKIMFATLQRSSLWCL, KAESKIMFATLQRSSLWCLC, |
| | AESKIMFATLQRSSLWCLCS, ESKIMFATLQRSSLWCLCSN, SKIMFATLQRSSLWCLCSNH |
| 21 mers | EPCSMLTGPPARVPAVPFDLH, PCSMLTGPPARVPAVPFDLHF, |
| | CSMLTGPPARVPAVPFDLHFC, SMLTGPPARVPAVPFDLHFCR, |
| | MLTGPPARVPAVPFDLHFCRS, LTGPPARVPAVPFDLHFCRSS, |
| | TGPPARVPAVPFDLHFCRSSI, GPPARVPAVPFDLHFCRSSIM, |
| | PPARVPAVPFDLHFCRSSIMK, PARVPAVPFDLHFCRSSIMKP, |
| | ARVPAVPFDLHFCRSSIMKPK, RVPAVPFDLHFCRSSIMKPKR, |
| | VPAVPFDLHFCRSSIMKPKRD, PAVPFDLHFCRSSIMKPKRDG, |
| | AVPFDLHFCRSSIMKPKRDGY, VPFDLHFCRSSIMKPKRDGYM, |
| | PFDLHFCRSSIMKPKRDGYMF, FDLHFCRSSIMKPKRDGYMFL, |
| | DLHFCRSSIMKPKRDGYMFLK, LHFCRSSIMKPKRDGYMFLKA, |
| | HFCRSSIMKPKRDGYMFLKAE, FCRSSIMKPKRDGYMFLKAES, |
| | CRSSIMKPKRDGYMFLKAESK, RSSIMKPKRDGYMFLKAESKI, |
| | SSIMKPKRDGYMFLKAESKIM, SIMKPKRDGYMFLKAESKIMF, |
| | IMKPKRDGYMFLKAESKIMFA, MKPKRDGYMFLKAESKIMFAT, |
| | KPKRDGYMFLKAESKIMFATL, PKRDGYMFLKAESKIMFATLQ, |
| | KRDGYMFLKAESKIMFATLQR, RDGYMFLKAESKIMFATLQRS, |
| | DGYMFLKAESKIMFATLQRSS, GYMFLKAESKIMFATLQRSSL, |
| | YMFLKAESKIMFATLQRSSLW, MFLKAESKIMFATLQRSSLWC, |
| | FLKAESKIMFATLQRSSLWCL, LKAESKIMFATLQRSSLWCLC, |
| | KAESKIMFATLQRSSLWCLCS, AESKIMFATLQRSSLWCLCSN, |
| | ESKIMFATLQRSSLWCLCSNH |
| 22 mers | EPCSMLTGPPARVPAVPFDLHF, PCSMLTGPPARVPAVPFDLHFC, |
| | CSMLTGPPARVPAVPFDLHFCR, SMLTGPPARVPAVPFDLHFCRS, |
| | MLTGPPARVPAVPFDLHFCRSS, LTGPPARVPAVPFDLHFCRSSI, |
| | TGPPARVPAVPFDLHFCRSSIM, GPPARVPAVPFDLHFCRSSIMK, |
| | PPARVPAVPFDLHFCRSSIMKP, PARVPAVPFDLHFCRSSIMKPK, |
| | ARVPAVPFDLHFCRSSIMKPKR, RVPAVPFDLHFCRSSIMKPKRD, |
| | VPAVPFDLHFCRSSIMKPKRDG, PAVPFDLHFCRSSIMKPKRDGY, |
| | AVPFDLHFCRSSIMKPKRDGYM, VPFDLHFCRSSIMKPKRDGYMF, |
| | PFDLHFCRSSIMKPKRDGYMFL, FDLHFCRSSIMKPKRDGYMFLK, |
| | DLHFCRSSIMKPKRDGYMFLKA, LHFCRSSIMKPKRDGYMFLKAE, |
| | HFCRSSIMKPKRDGYMFLKAES, FCRSSIMKPKRDGYMFLKAESK, |
| | CRSSIMKPKRDGYMFLKAESKI, RSSIMKPKRDGYMFLKAESKIM, |
| | SSIMKPKRDGYMFLKAESKIMF, SIMKPKRDGYMFLKAESKIMFA, |
| | IMKPKRDGYMFLKAESKIMFAT, MKPKRDGYMFLKAESKIMFATL, |
| | KPKRDGYMFLKAESKIMFATLQ, PKRDGYMFLKAESKIMFATLQR, |
| | KRDGYMFLKAESKIMFATLQRS, RDGYMFLKAESKIMFATLQRSS, |
| | DGYMFLKAESKIMFATLQRSSL, GYMFLKAESKIMFATLQRSSLW, |
| | YMFLKAESKIMFATLQRSSLWC, MFLKAESKIMFATLQRSSLWCL, |
| | FLKAESKIMFATLQRSSLWCLC, LKAESKIMFATLQRSSLWCLCS, |
| | KAESKIMFATLQRSSLWCLCSN, AESKIMFATLQRSSLWCLCSNH |
| 23 mers | EPCSMLTGPPARVPAVPFDLHFC, PCSMLTGPPARVPAVPFDLHFCR, |
| | CSMLTGPPARVPAVPFDLHFCRS, SMLTGPPARVPAVPFDLHFCRSS, |
| | MLTGPPARVPAVPFDLHFCRSSI, LTGPPARVPAVPFDLHFCRSSIM, |
| | TGPPARVPAVPFDLHFCRSSIMK, GPPARVPAVPFDLHFCRSSIMKP, |
| | PPARVPAVPFDLHFCRSSIMKPK, PARVPAVPFDLHFCRSSIMKPKR, |
| | ARVPAVPFDLHFCRSSIMKPKRD, RVPAVPFDLHFCRSSIMKPKRDG, |
| | VPAVPFDLHFCRSSIMKPKRDGY, PAVPFDLHFCRSSIMKPKRDGYM, |
| | AVPFDLHFCRSSIMKPKRDGYMF, VPFDLHFCRSSIMKPKRDGYMFL, |
| | PFDLHFCRSSIMKPKRDGYMFLK, FDLHFCRSSIMKPKRDGYMFLKA, |
| | DLHFCRSSIMKPKRDGYMFLKAE, LHFCRSSIMKPKRDGYMFLKAES, |
| | HFCRSSIMKPKRDGYMFLKAESK, FCRSSIMKPKRDGYMFLKAESKI, |
| | CRSSIMKPKRDGYMFLKAESKIM, RSSIMKPKRDGYMFLKAESKIMF, |
| | SSIMKPKRDGYMFLKAESKIMFA, SIMKPKRDGYMFLKAESKIMFAT, |
| | IMKPKRDGYMFLKAESKIMFATL, MKPKRDGYMFLKAESKIMFATLQ, |
| | KPKRDGYMFLKAESKIMFATLQR, PKRDGYMFLKAESKIMFATLQRS, |
| | KRDGYMFLKAESKIMFATLQRSS, RDGYMFLKAESKIMFATLQRSSL, |
| | DGYMFLKAESKIMFATLQRSSLW, GYMFLKAESKIMFATLQRSSLWC, |
| | YMFLKAESKIMFATLQRSSLWCL, MFLKAESKIMFATLQRSSLWCLC, |
| | FLKAESKIMFATLQRSSLWCLCS, LKAESKIMFATLQRSSLWCLCSN, |
| | KAESKIMFATLQRSSLWCLCSNH |
| 24 mers | EPCSMLTGPPARVPAVPFDLHFCR, PCSMLTGPPARVPAVPFDLHFCRS, |
| | CSMLTGPPARVPAVPFDLHFCRSS, SMLTGPPARVPAVPFDLHFCRSSI, |
| | MLTGPPARVPAVPFDLHFCRSSIM, LTGPPARVPAVPFDLHFCRSSIMK, |
| | TGPPARVPAVPFDLHFCRSSIMKP, GPPARVPAVPFDLHFCRSSIMKPK, |
| | PPARVPAVPFDLHFCRSSIMKPKR, PARVPAVPFDLHFCRSSIMKPKRD, |
| | ARVPAVPFDLHFCRSSIMKPKRDG, RVPAVPFDLHFCRSSIMKPKRDGY, |
| | VPAVPFDLHFCRSSIMKPKRDGYM, PAVPFDLHFCRSSIMKPKRDGYMF, |
| | AVPFDLHFCRSSIMKPKRDGYMFL, VPFDLHFCRSSIMKPKRDGYMFLK, |
| | PFDLHFCRSSIMKPKRDGYMFLKA, FDLHFCRSSIMKPKRDGYMFLKAE, |
| | DLHFCRSSIMKPKRDGYMFLKAES, LHFCRSSIMKPKRDGYMFLKAESK, |
| | HFCRSSIMKPKRDGYMFLKAESKI, FCRSSIMKPKRDGYMFLKAESKIM, |
| | CRSSIMKPKRDGYMFLKAESKIMF, RSSIMKPKRDGYMFLKAESKIMFA, |
| | SSIMKPKRDGYMFLKAESKIMFAT, SIMKPKRDGYMFLKAESKIMFATL, |
| | IMKPKRDGYMFLKAESKIMFATLQ, MKPKRDGYMFLKAESKIMFATLQR, |
| | KPKRDGYMFLKAESKIMFATLQRS, PKRDGYMFLKAESKIMFATLQRSS, |
| | KRDGYMFLKAESKIMFATLQRSSL, RDGYMFLKAESKIMFATLQRSSLW, |
| | DGYMFLKAESKIMFATLQRSSLWC, GYMFLKAESKIMFATLQRSSLWCL, |
| | YMFLKAESKIMFATLQRSSLWCLC, MFLKAESKIMFATLQRSSLWCLCS, |
| | FLKAESKIMFATLQRSSLWCLCSN, LKAESKIMFATLQRSSLWCLCSNH |
| 25 mers | EPCSMLTGPPARVPAVPFDLHFCRS, PCSMLTGPPARVPAVPFDLHFCRSS, |
| | CSMLTGPPARVPAVPFDLHFCRSSI, SMLTGPPARVPAVPFDLHFCRSSIM, |
| | MLTGPPARVPAVPFDLHFCRSSIMK, LTGPPARVPAVPFDLHFCRSSIMKP, |
| | TGPPARVPAVPFDLHFCRSSIMKPK, GPPARVPAVPFDLHFCRSSIMKPKR, |
| | PPARVPAVPFDLHFCRSSIMKPKRD, PARVPAVPFDLHFCRSSIMKPKRDG, |
| | ARVPAVPFDLHFCRSSIMKPKRDGY, RVPAVPFDLHFCRSSIMKPKRDGYM, |
| | VPAVPFDLHFCRSSIMKPKRDGYMF, PAVPFDLHFCRSSIMKPKRDGYMFL, |
| | AVPFDLHFCRSSIMKPKRDGYMFLK, VPFDLHFCRSSIMKPKRDGYMFLKA, |
| | PFDLHFCRSSIMKPKRDGYMFLKAE, FDLHFCRSSIMKPKRDGYMFLKAES, |
| | DLHFCRSSIMKPKRDGYMFLKAESK, LHFCRSSIMKPKRDGYMFLKAESKI, |
| | HFCRSSIMKPKRDGYMFLKAESKIM, FCRSSIMKPKRDGYMFLKAESKIMF, |
| | CRSSIMKPKRDGYMFLKAESKIMFA, RSSIMKPKRDGYMFLKAESKIMFAT, |
| | SSIMKPKRDGYMFLKAESKIMFATL, SIMKPKRDGYMFLKAESKIMFATLQ, |
| | IMKPKRDGYMFLKAESKIMFATLQR, MKPKRDGYMFLKAESKIMFATLQRS, |
| | KPKRDGYMFLKAESKIMFATLQRSS, PKRDGYMFLKAESKIMFATLQRSSL, |
| | KRDGYMFLKAESKIMFATLQRSSLW, RDGYMFLKAESKIMFATLQRSSLWC, |
| | DGYMFLKAESKIMFATLQRSSLWCL, GYMFLKAESKIMFATLQRSSLWCLC, |
| | YMFLKAESKIMFATLQRSSLWCLCS, MFLKAESKIMFATLQRSSLWCLCSN, |
| | FLKAESKIMFATLQRSSLWCLCSNH |
| 26 mers | EPCSMLTGPPARVPAVPFDLHFCRSS, PCSMLTGPPARVPAVPFDLHFCRSSI, |
| | CSMLTGPPARVPAVPFDLHFCRSSIM, SMLTGPPARVPAVPFDLHFCRSSIMK, |
| | MLTGPPARVPAVPFDLHFCRSSIMKP, LTGPPARVPAVPFDLHFCRSSIMKPK, |
| | TGPPARVPAVPFDLHFCRSSIMKPKR, GPPARVPAVPFDLHFCRSSIMKPKRD, |
| | PPARVPAVPFDLHFCRSSIMKPKRDG, PARVPAVPFDLHFCRSSIMKPKRDGY, |
| | ARVPAVPFDLHFCRSSIMKPKRDGYM, RVPAVPFDLHFCRSSIMKPKRDGYMF, |
| | VPAVPFDLHFCRSSIMKPKRDGYMFL, PAVPFDLHFCRSSIMKPKRDGYMFLK, |
| | AVPFDLHFCRSSIMKPKRDGYMFLKA, VPFDLHFCRSSIMKPKRDGYMFLKAE, |
| | PFDLHFCRSSIMKPKRDGYMFLKAES, FDLHFCRSSIMKPKRDGYMFLKAESK, |
| | DLHFCRSSIMKPKRDGYMFLKAESKI, LHFCRSSIMKPKRDGYMFLKAESKIM, |
| | HFCRSSIMKPKRDGYMFLKAESKIMF, FCRSSIMKPKRDGYMFLKAESKIMFA, |
| | CRSSIMKPKRDGYMFLKAESKIMFAT, RSSIMKPKRDGYMFLKAESKIMFATL, |
| | SSIMKPKRDGYMFLKAESKIMFATLQ, SIMKPKRDGYMFLKAESKIMFATLQR, |
| | IMKPKRDGYMFLKAESKIMFATLQRS, MKPKRDGYMFLKAESKIMFATLQRSS, |
| | KPKRDGYMFLKAESKIMFATLQRSSL, PKRDGYMFLKAESKIMFATLQRSSLW, |
| | KRDGYMFLKAESKIMFATLQRSSLWC, RDGYMFLKAESKIMFATLQRSSLWCL, |
| | DGYMFLKAESKIMFATLQRSSLWCLC, GYMFLKAESKIMFATLQRSSLWCLCS, |
| | YMFLKAESKIMFATLQRSSLWCLCSN, MFLKAESKIMFATLQRSSLWCLCSNH |
| 27 mers | EPCSMLTGPPARVPAVPFDLHFCRSSI, PCSMLTGPPARVPAVPFDLHFCRSSIM, |
| | CSMLTGPPARVPAVPFDLHFCRSSIMK, SMLTGPPARVPAVPFDLHFCRSSIMKP, |
| | MLTGPPARVPAVPFDLHFCRSSIMKPK, LTGPPARVPAVPFDLHFCRSSIMKPKR, |
| | TGPPARVPAVPFDLHFCRSSIMKPKRD, GPPARVPAVPFDLHFCRSSIMKPKRDG, |
| | PPARVPAVPFDLHFCRSSIMKPKRDGY, PARVPAVPFDLHFCRSSIMKPKRDGYM, |
| | ARVPAVPFDLHFCRSSIMKPKRDGYMF, RVPAVPFDLHFCRSSIMKPKRDGYMFL, |
| | VPAVPFDLHFCRSSIMKPKRDGYMFLK, PAVPFDLHFCRSSIMKPKRDGYMFLKA, |
| | AVPFDLHFCRSSIMKPKRDGYMFLKAE, VPFDLHFCRSSIMKPKRDGYMFLKAES, |
| | PFDLHFCRSSIMKPKRDGYMFLKAESK, FDLHFCRSSIMKPKRDGYMFLKAESKI, |
| | DLHFCRSSIMKPKRDGYMFLKAESKIM, LHFCRSSIMKPKRDGYMFLKAESKIMF, |
| | HFCRSSIMKPKRDGYMFLKAESKIMFA, FCRSSIMKPKRDGYMFLKAESKIMFAT, |
| | CRSSIMKPKRDGYMFLKAESKIMFATL, RSSIMKPKRDGYMFLKAESKIMFATLQ, |
| | SSIMKPKRDGYMFLKAESKIMFATLQR, SIMKPKRDGYMFLKAESKIMFATLQRS, |
| | IMKPKRDGYMFLKAESKIMFATLQRSS, MKPKRDGYMFLKAESKIMFATLQRSSL, |
| | KPKRDGYMFLKAESKIMFATLQRSSLW, PKRDGYMFLKAESKIMFATLQRSSLWC, |
| | KRDGYMFLKAESKIMFATLQRSSLWCL, RDGYMFLKAESKIMFATLQRSSLWCLC, |
| | DGYMFLKAESKIMFATLQRSSLWCLCS, GYMFLKAESKIMFATLQRSSLWCLCSN, |
| | YMFLKAESKIMFATLQRSSLWCLCSNH |
| 28 mers | EPCSMLTGPPARVPAVPFDLHFCRSSIM, PCSMLTGPPARVPAVPFDLHFCRSSIMK, |
| | CSMLTGPPARVPAVPFDLHFCRSSIMKP, SMLTGPPARVPAVPFDLHFCRSSIMKPK, |
| | MLTGPPARVPAVPFDLHFCRSSIMKPKR, LTGPPARVPAVPFDLHFCRSSIMKPKRD, |
| | TGPPARVPAVPFDLHFCRSSIMKPKRDG, GPPARVPAVPFDLHFCRSSIMKPKRDGY, |
| | PPARVPAVPFDLHFCRSSIMKPKRDGYM, PARVPAVPFDLHFCRSSIMKPKRDGYMF, |
| | ARVPAVPFDLHFCRSSIMKPKRDGYMFL, RVPAVPFDLHFCRSSIMKPKRDGYMFLK, |
| | VPAVPFDLHFCRSSIMKPKRDGYMFLKA, PAVPFDLHFCRSSIMKPKRDGYMFLKAE, |
| | AVPFDLHFCRSSIMKPKRDGYMFLKAES, VPFDLHFCRSSIMKPKRDGYMFLKAESK, |
| | PFDLHFCRSSIMKPKRDGYMFLKAESKI, FDLHFCRSSIMKPKRDGYMFLKAESKIM, |
| | DLHFCRSSIMKPKRDGYMFLKAESKIMF, LHFCRSSIMKPKRDGYMFLKAESKIMFA, |
| | HFCRSSIMKPKRDGYMFLKAESKIMFAT, FCRSSIMKPKRDGYMFLKAESKIMFATL, |
| | CRSSIMKPKRDGYMFLKAESKIMFATLQ, RSSIMKPKRDGYMFLKAESKIMFATLQR, |
| | SSIMKPKRDGYMFLKAESKIMFATLQRS, SIMKPKRDGYMFLKAESKIMFATLQRSS, |
| | IMKPKRDGYMFLKAESKIMFATLQRSSL, MKPKRDGYMFLKAESKIMFATLQRSSLW, |
| | KPKRDGYMFLKAESKIMFATLQRSSLWC, PKRDGYMFLKAESKIMFATLQRSSLWCL, |
| | KRDGYMFLKAESKIMFATLQRSSLWCLC, RDGYMFLKAESKIMFATLQRSSLWCLCS, |
| | DGYMFLKAESKIMFATLQRSSLWCLCSN, GYMFLKAESKIMFATLQRSSLWCLCSNH |
| 29 mers | EPCSMLTGPPARVPAVPFDLHFCRSSIMK, PCSMLTGPPARVPAVPFDLHFCRSSIMKP, |
| | CSMLTGPPARVPAVPFDLHFCRSSIMKPK, SMLTGPPARVPAVPFDLHFCRSSIMKPKR, |
| | MLTGPPARVPAVPFDLHFCRSSIMKPKRD, LTGPPARVPAVPFDLHFCRSSIMKPKRDG, |
| | TGPPARVPAVPFDLHFCRSSIMKPKRDGY, GPPARVPAVPFDLHFCRSSIMKPKRDGYM, |
| | PPARVPAVPFDLHFCRSSIMKPKRDGYMF, PARVPAVPFDLHFCRSSIMKPKRDGYMFL, |
| | ARVPAVPFDLHFCRSSIMKPKRDGYMFLK, RVPAVPFDLHFCRSSIMKPKRDGYMFLKA, |
| | VPAVPFDLHFCRSSIMKPKRDGYMFLKAE, PAVPFDLHFCRSSIMKPKRDGYMFLKAES, |
| | AVPFDLHFCRSSIMKPKRDGYMFLKAESK, VPFDLHFCRSSIMKPKRDGYMFLKAESKI, |
| | PFDLHFCRSSIMKPKRDGYMFLKAESKIM, FDLHFCRSSIMKPKRDGYMFLKAESKIMF, |
| | DLHFCRSSIMKPKRDGYMFLKAESKIMFA, LHFCRSSIMKPKRDGYMFLKAESKIMFAT, |
| | HFCRSSIMKPKRDGYMFLKAESKIMFATL, FCRSSIMKPKRDGYMFLKAESKIMFATLQ, |
| | CRSSIMKPKRDGYMFLKAESKIMFATLQR, RSSIMKPKRDGYMFLKAESKIMFATLQRS, |
| | SSIMKPKRDGYMFLKAESKIMFATLQRSS, SIMKPKRDGYMFLKAESKIMFATLQRSSL, |
| | IMKPKRDGYMFLKAESKIMFATLQRSSLW, MKPKRDGYMFLKAESKIMFATLQRSSLWC, |
| | KPKRDGYMFLKAESKIMFATLQRSSLWCL, PKRDGYMFLKAESKIMFATLQRSSLWCLC, |
| | KRDGYMFLKAESKIMFATLQRSSLWCLCS, RDGYMFLKAESKIMFATLQRSSLWCLCSN, |
| | DGYMFLKAESKIMFATLQRSSLWCLCSNH |
| 30 mers | EPCSMLTGPPARVPAVPFDLHFCRSSIMKP, PCSMLTGPPARVPAVPFDLHFCRSSIMKPK, |
| | CSMLTGPPARVPAVPFDLHFCRSSIMKPKR, SMLTGPPARVPAVPFDLHFCRSSIMKPKRD, |
| | MLTGPPARVPAVPFDLHFCRSSIMKPKRDG, LTGPPARVPAVPFDLHFCRSSIMKPKRDGY, |
| | TGPPARVPAVPFDLHFCRSSIMKPKRDGYM, GPPARVPAVPFDLHFCRSSIMKPKRDGYMF, |
| | PPARVPAVPFDLHFCRSSIMKPKRDGYMFL, PARVPAVPFDLHFCRSSIMKPKRDGYMFLK, |
| | ARVPAVPFDLHFCRSSIMKPKRDGYMFLKA, RVPAVPFDLHFCRSSIMKPKRDGYMFLKAE, |
| | VPAVPFDLHFCRSSIMKPKRDGYMFLKAES, PAVPFDLHFCRSSIMKPKRDGYMFLKAESK, |
| | AVPFDLHFCRSSIMKPKRDGYMFLKAESKI, VPFDLHFCRSSIMKPKRDGYMFLKAESKIM, |
| | PFDLHFCRSSIMKPKRDGYMFLKAESKIMF, FDLHFCRSSIMKPKRDGYMFLKAESKIMFA, |
| | DLHFCRSSIMKPKRDGYMFLKAESKIMFAT, LHFCRSSIMKPKRDGYMFLKAESKIMFATL, |
| | HFCRSSIMKPKRDGYMFLKAESKIMFATLQ, FCRSSIMKPKRDGYMFLKAESKIMFATLQR, |
| | CRSSIMKPKRDGYMFLKAESKIMFATLQRS, RSSIMKPKRDGYMFLKAESKIMFATLQRSS, |
| | SSIMKPKRDGYMFLKAESKIMFATLQRSSL, SIMKPKRDGYMFLKAESKIMFATLQRSSLW, |
| | IMKPKRDGYMFLKAESKIMFATLQRSSLWC, |
| | MKPKRDGYMFLKAESKIMFATLQRSSLWCL, |
| | KPKRDGYMFLKAESKIMFATLQRSSLWCLC, PKRDGYMFLKAESKIMFATLQRSSLWCLCS, |
| | KRDGYMFLKAESKIMFATLQRSSLWCLCSN, RDGYMFLKAESKIMFATLQRSSLWCLCSNH |
| 31 mers | EPCSMLTGPPARVPAVPFDLHFCRSSIMKPK, PCSMLTGPPARVPAVPFDLHFCRSSIMKPKR, |
| | CSMLTGPPARVPAVPFDLHFCRSSIMKPKRD, |
| | SMLTGPPARVPAVPFDLHFCRSSIMKPKRDG, |
| | MLTGPPARVPAVPFDLHFCRSSIMKPKRDGY, |
| | LTGPPARVPAVPFDLHFCRSSIMKPKRDGYM, |
| | TGPPARVPAVPFDLHFCRSSIMKPKRDGYMF, |
| | GPPARVPAVPFDLHFCRSSIMKPKRDGYMFL, |
| | PPARVPAVPFDLHFCRSSIMKPKRDGYMFLK, |
| | PARVPAVPFDLHFCRSSIMKPKRDGYMFLKA, |
| | ARVPAVPFDLHFCRSSIMKPKRDGYMFLKAE, |
| | RVPAVPFDLHFCRSSIMKPKRDGYMFLKAES, |
| | VPAVPFDLHFCRSSIMKPKRDGYMFLKAESK, |
| | PAVPFDLHFCRSSIMKPKRDGYMFLKAESKI, |
| | AVPFDLHFCRSSIMKPKRDGYMFLKAESKIM, |
| | VPFDLHFCRSSIMKPKRDGYMFLKAESKIMF, |
| | PFDLHFCRSSIMKPKRDGYMFLKAESKIMFA, |
| | FDLHFCRSSIMKPKRDGYMFLKAESKIMFAT, |
| | DLHFCRSSIMKPKRDGYMFLKAESKIMFATL, |
| | LHFCRSSIMKPKRDGYMFLKAESKIMFATLQ, |
| | HFCRSSIMKPKRDGYMFLKAESKIMFATLQR, |
| | FCRSSIMKPKRDGYMFLKAESKIMFATLQRS, |
| | CRSSIMKPKRDGYMFLKAESKIMFATLQRSS, |
| | RSSIMKPKRDGYMFLKAESKIMFATLQRSSL, |
| | SSIMKPKRDGYMFLKAESKIMFATLQRSSLW, |
| | SIMKPKRDGYMFLKAESKIMFATLQRSSLWC, |
| | IMKPKRDGYMFLKAESKIMFATLQRSSLWCL, |
| | MKPKRDGYMFLKAESKIMFATLQRSSLWCLC, |
| | KPKRDGYMFLKAESKIMFATLQRSSLWCLCS, |
| | PKRDGYMFLKAESKIMFATLQRSSLWCLCSN, |
| | KRDGYMFLKAESKIMFATLQRSSLWCLCSNH |
| 32 mers | EPCSMLTGPPARVPAVPFDLHFCRSSIMKPKR, |
| | PCSMLTGPPARVPAVPFDLHFCRSSIMKPKRD, |
| | CSMLTGPPARVPAVPFDLHFCRSSIMKPKRDG, |
| | SMLTGPPARVPAVPFDLHFCRSSIMKPKRDGY, |
| | MLTGPPARVPAVPFDLHFCRSSIMKPKRDGYM, |
| | LTGPPARVPAVPFDLHFCRSSIMKPKRDGYMF, |
| | TGPPARVPAVPFDLHFCRSSIMKPKRDGYMFL, |
| | GPPARVPAVPFDLHFCRSSIMKPKRDGYMFLK, |
| | PPARVPAVPFDLHFCRSSIMKPKRDGYMFLKA, |
| | PARVPAVPFDLHFCRSSIMKPKRDGYMFLKAE, |
| | ARVPAVPFDLHFCRSSIMKPKRDGYMFLKAES, |
| | RVPAVPFDLHFCRSSIMKPKRDGYMFLKAESK, |
| | VPAVPFDLHFCRSSIMKPKRDGYMFLKAESKI, |
| | PAVPFDLHFCRSSIMKPKRDGYMFLKAESKIM, |
| | AVPFDLHFCRSSIMKPKRDGYMFLKAESKIMF, |
| | VPFDLHFCRSSIMKPKRDGYMFLKAESKIMFA, |
| | PFDLHFCRSSIMKPKRDGYMFLKAESKIMFAT, |
| | FDLHFCRSSIMKPKRDGYMFLKAESKIMFATL, |
| | DLHFCRSSIMKPKRDGYMFLKAESKIMFATLQ, |
| | LHFCRSSIMKPKRDGYMFLKAESKIMFATLQR, |
| | HFCRSSIMKPKRDGYMFLKAESKIMFATLQRS, |
| | FCRSSIMKPKRDGYMFLKAESKIMFATLQRSS, |
| | CRSSIMKPKRDGYMFLKAESKIMFATLQRSSL, |
| | RSSIMKPKRDGYMFLKAESKIMFATLQRSSLW, |
| | SSIMKPKRDGYMFLKAESKIMFATLQRSSLWC, |
| | SIMKPKRDGYMFLKAESKIMFATLQRSSLWCL, |
| | IMKPKRDGYMFLKAESKIMFATLQRSSLWCLC, |
| | MKPKRDGYMFLKAESKIMFATLQRSSLWCLCS, |
| | KPKRDGYMFLKAESKIMFATLQRSSLWCLCSN, |
| | PKRDGYMFLKAESKIMFATLQRSSLWCLCSNH |
| 33 mers | EPCSMLTGPPARVPAVPFDLHFCRSSIMKPKRD, |
| | PCSMLTGPPARVPAVPFDLHFCRSSIMKPKRDG, |
| | CSMLTGPPARVPAVPFDLHFCRSSIMKPKRDGY, |
| | SMLTGPPARVPAVPFDLHFCRSSIMKPKRDGYM, |
| | MLTGPPARVPAVPFDLHFCRSSIMKPKRDGYMF, |
| | LTGPPARVPAVPFDLHFCRSSIMKPKRDGYMFL, |
| | TGPPARVPAVPFDLHFCRSSIMKPKRDGYMFLK, |
| | GPPARVPAVPFDLHFCRSSIMKPKRDGYMFLKA, |
| | PPARVPAVPFDLHFCRSSIMKPKRDGYMFLKAE, |
| | PARVPAVPFDLHFCRSSIMKPKRDGYMFLKAES, |
| | ARVPAVPFDLHFCRSSIMKPKRDGYMFLKAESK, |
| | RVPAVPFDLHFCRSSIMKPKRDGYMFLKAESKI, |
| | VPAVPFDLHFCRSSIMKPKRDGYMFLKAESKIM, |
| | PAVPFDLHFCRSSIMKPKRDGYMFLKAESKIMF, |
| | AVPFDLHFCRSSIMKPKRDGYMFLKAESKIMFA, |
| | VPFDLHFCRSSIMKPKRDGYMFLKAESKIMFAT, |
| | PFDLHFCRSSIMKPKRDGYMFLKAESKIMFATL, |
| | FDLHFCRSSIMKPKRDGYMFLKAESKIMFATLQ, |
| | DLHFCRSSIMKPKRDGYMFLKAESKIMFATLQR, |
| | LHFCRSSIMKPKRDGYMFLKAESKIMFATLQRS, |
| | HFCRSSIMKPKRDGYMFLKAESKIMFATLQRSS, |
| | FCRSSIMKPKRDGYMFLKAESKIMFATLQRSSL, |
| | CRSSIMKPKRDGYMFLKAESKIMFATLQRSSLW, |
| | RSSIMKPKRDGYMFLKAESKIMFATLQRSSLWC, |
| | SSIMKPKRDGYMFLKAESKIMFATLQRSSLWCL, |
| | SIMKPKRDGYMFLKAESKIMFATLQRSSLWCLC, |
| | IMKPKRDGYMFLKAESKIMFATLQRSSLWCLCS, |
| | MKPKRDGYMFLKAESKIMFATLQRSSLWCLCSN, |
| | KPKRDGYMFLKAESKIMFATLQRSSLWCLCSNH |
| 34 mers | EPCSMLTGPPARVPAVPFDLHFCRSSIMKPKRDG, |
| | PCSMLTGPPARVPAVPFDLHFCRSSIMKPKRDGY, |
| | CSMLTGPPARVPAVPFDLHFCRSSIMKPKRDGYM, |
| | SMLTGPPARVPAVPFDLHFCRSSIMKPKRDGYMF, |
| | MLTGPPARVPAVPFDLHFCRSSIMKPKRDGYMFL, |
| | LTGPPARVPAVPFDLHFCRSSIMKPKRDGYMFLK, |
| | TGPPARVPAVPFDLHFCRSSIMKPKRDGYMFLKA, |
| | GPPARVPAVPFDLHFCRSSIMKPKRDGYMFLKAE, |
| | PPARVPAVPFDLHFCRSSIMKPKRDGYMFLKAES, |
| | PARVPAVPFDLHFCRSSIMKPKRDGYMFLKAESK, |
| | ARVPAVPFDLHFCRSSIMKPKRDGYMFLKAESKI, |
| | RVPAVPFDLHFCRSSIMKPKRDGYMFLKAESKIM, |
| | VPAVPFDLHFCRSSIMKPKRDGYMFLKAESKIMF, |
| | PAVPFDLHFCRSSIMKPKRDGYMFLKAESKIMFA, |
| | AVPFDLHFCRSSIMKPKRDGYMFLKAESKIMFAT, |
| | VPFDLHFCRSSIMKPKRDGYMFLKAESKIMFATL, |
| | PFDLHFCRSSIMKPKRDGYMFLKAESKIMFATLQ, |
| | FDLHFCRSSIMKPKRDGYMFLKAESKIMFATLQR, |
| | DLHFCRSSIMKPKRDGYMFLKAESKIMFATLQRS, |
| | LHFCRSSIMKPKRDGYMFLKAESKIMFATLQRSS, |
| | HFCRSSIMKPKRDGYMFLKAESKIMFATLQRSSL, |
| | FCRSSIMKPKRDGYMFLKAESKIMFATLQRSSLW, |
| | CRSSIMKPKRDGYMFLKAESKIMFATLQRSSLWC, |
| | RSSIMKPKRDGYMFLKAESKIMFATLQRSSLWCL, |
| | SSIMKPKRDGYMFLKAESKIMFATLQRSSLWCLC, |
| | SIMKPKRDGYMFLKAESKIMFATLQRSSLWCLCS, |
| | IMKPKRDGYMFLKAESKIMFATLQRSSLWCLCSN, |
| | MKPKRDGYMFLKAESKIMFATLQRSSLWCLCSNH |
| 35 mers | EPCSMLTGPPARVPAVPFDLHFCRSSIMKPKRDGY, |
| | PCSMLTGPPARVPAVPFDLHFCRSSIMKPKRDGYM, |
| | CSMLTGPPARVPAVPFDLHFCRSSIMKPKRDGYMF, |
| | SMLTGPPARVPAVPFDLHFCRSSIMKPKRDGYMFL, |
| | MLTGPPARVPAVPFDLHFCRSSIMKPKRDGYMFLK, |
| | LTGPPARVPAVPFDLHFCRSSIMKPKRDGYMFLKA, |
| | TGPPARVPAVPFDLHFCRSSIMKPKRDGYMFLKAE, |
| | GPPARVPAVPFDLHFCRSSIMKPKRDGYMFLKAES, |
| | PPARVPAVPFDLHFCRSSIMKPKRDGYMFLKAESK, |
| | PARVPAVPFDLHFCRSSIMKPKRDGYMFLKAESKI, |
| | ARVPAVPFDLHFCRSSIMKPKRDGYMFLKAESKIM, |
| | RVPAVPFDLHFCRSSIMKPKRDGYMFLKAESKIMF, |
| | VPAVPFDLHFCRSSIMKPKRDGYMFLKAESKIMFA, |
| | PAVPFDLHFCRSSIMKPKRDGYMFLKAESKIMFAT, |
| | AVPFDLHFCRSSIMKPKRDGYMFLKAESKIMFATL, |
| | VPFDLHFCRSSIMKPKRDGYMFLKAESKIMFATLQ, |
| | PFDLHFCRSSIMKPKRDGYMFLKAESKIMFATLQR, |
| | FDLHFCRSSIMKPKRDGYMFLKAESKIMFATLQRS, |
| | DLHFCRSSIMKPKRDGYMFLKAESKIMFATLQRSS, |
| | LHFCRSSIMKPKRDGYMFLKAESKIMFATLQRSSL, |
| | HFCRSSIMKPKRDGYMFLKAESKIMFATLQRSSLW, |
| | FCRSSIMKPKRDGYMFLKAESKIMFATLQRSSLWC, |
| | CRSSIMKPKRDGYMFLKAESKIMFATLQRSSLWCL, |
| | RSSIMKPKRDGYMFLKAESKIMFATLQRSSLWCLC, |
| | SSIMKPKRDGYMFLKAESKIMFATLQRSSLWCLCS, |
| | SIMKPKRDGYMFLKAESKIMFATLQRSSLWCLCSN, |
| | IMKPKRDGYMFLKAESKIMFATLQRSSLWCLCSNH |
| 36 mers | EPCSMLTGPPARVPAVPFDLHFCRSSIMKPKRDGYM, |
| | PCSMLTGPPARVPAVPFDLHFCRSSIMKPKRDGYMF, |
| | CSMLTGPPARVPAVPFDLHFCRSSIMKPKRDGYMFL, |
| | SMLTGPPARVPAVPFDLHFCRSSIMKPKRDGYMFLK, |
| | MLTGPPARVPAVPFDLHFCRSSIMKPKRDGYMFLKA, |
| | LTGPPARVPAVPFDLHFCRSSIMKPKRDGYMFLKAE, |
| | TGPPARVPAVPFDLHFCRSSIMKPKRDGYMFLKAES, |
| | GPPARVPAVPFDLHFCRSSIMKPKRDGYMFLKAESK, |
| | PPARVPAVPFDLHFCRSSIMKPKRDGYMFLKAESKI, |
| | PARVPAVPFDLHFCRSSIMKPKRDGYMFLKAESKIM, |
| | ARVPAVPFDLHFCRSSIMKPKRDGYMFLKAESKIMF, |
| | RVPAVPFDLHFCRSSIMKPKRDGYMFLKAESKIMFA, |
| | VPAVPFDLHFCRSSIMKPKRDGYMFLKAESKIMFAT, |
| | PAVPFDLHFCRSSIMKPKRDGYMFLKAESKIMFATL, |
| | AVPFDLHFCRSSIMKPKRDGYMFLKAESKIMFATLQ, |
| | VPFDLHFCRSSIMKPKRDGYMFLKAESKIMFATLQR, |
| | PFDLHFCRSSIMKPKRDGYMFLKAESKIMFATLQRS, |
| | FDLHFCRSSIMKPKRDGYMFLKAESKIMFATLQRSS, |
| | DLHFCRSSIMKPKRDGYMFLKAESKIMFATLQRSSL, |
| | LHFCRSSIMKPKRDGYMFLKAESKIMFATLQRSSLW, |
| | HFCRSSIMKPKRDGYMFLKAESKIMFATLQRSSLWC, |
| | FCRSSIMKPKRDGYMFLKAESKIMFATLQRSSLWCL, |
| | CRSSIMKPKRDGYMFLKAESKIMFATLQRSSLWCLC, |
| | RSSIMKPKRDGYMFLKAESKIMFATLQRSSLWCLCS, |
| | SSIMKPKRDGYMFLKAESKIMFATLQRSSLWCLCSN, |
| | SIMKPKRDGYMFLKAESKIMFATLQRSSLWCLCSNH |
| 37 mers | EPCSMLTGPPARVPAVPFDLHFCRSSIMKPKRDGYMF, |
| | PCSMLTGPPARVPAVPFDLHFCRSSIMKPKRDGYMFL, |
| | CSMLTGPPARVPAVPFDLHFCRSSIMKPKRDGYMFLK, |
| | SMLTGPPARVPAVPFDLHFCRSSIMKPKRDGYMFLKA, |
| | MLTGPPARVPAVPFDLHFCRSSIMKPKRDGYMFLKAE, |
| | LTGPPARVPAVPFDLHFCRSSIMKPKRDGYMFLKAES, |
| | TGPPARVPAVPFDLHFCRSSIMKPKRDGYMFLKAESK, |
| | GPPARVPAVPFDLHFCRSSIMKPKRDGYMFLKAESKI, |
| | PPARVPAVPFDLHFCRSSIMKPKRDGYMFLKAESKIM, |
| | PARVPAVPFDLHFCRSSIMKPKRDGYMFLKAESKIMF, |
| | ARVPAVPFDLHFCRSSIMKPKRDGYMFLKAESKIMFA, |
| | RVPAVPFDLHFCRSSIMKPKRDGYMFLKAESKIMFAT, |
| | VPAVPFDLHFCRSSIMKPKRDGYMFLKAESKIMFATL, |
| | PAVPFDLHFCRSSIMKPKRDGYMFLKAESKIMFATLQ, |
| | AVPFDLHFCRSSIMKPKRDGYMFLKAESKIMFATLQR, |
| | VPFDLHFCRSSIMKPKRDGYMFLKAESKIMFATLQRS, |
| | PFDLHFCRSSIMKPKRDGYMFLKAESKIMFATLQRSS, |
| | FDLHFCRSSIMKPKRDGYMFLKAESKIMFATLQRSSL, |
| | DLHFCRSSIMKPKRDGYMFLKAESKIMFATLQRSSLW, |
| | LHFCRSSIMKPKRDGYMFLKAESKIMFATLQRSSLWC, |
| | HFCRSSIMKPKRDGYMFLKAESKIMFATLQRSSLWCL, |
| | FCRSSIMKPKRDGYMFLKAESKIMFATLQRSSLWCLC, |
| | CRSSIMKPKRDGYMFLKAESKIMFATLQRSSLWCLCS, |
| | RSSIMKPKRDGYMFLKAESKIMFATLQRSSLWCLCSN, |
| | SSIMKPKRDGYMFLKAESKIMFATLQRSSLWCLCSNH |
| 38 mers | EPCSMLTGPPARVPAVPFDLHFCRSSIMKPKRDGYMFL, |
| | PCSMLTGPPARVPAVPFDLHFCRSSIMKPKRDGYMFLK, |
| | CSMLTGPPARVPAVPFDLHFCRSSIMKPKRDGYMFLKA, |
| | SMLTGPPARVPAVPFDLHFCRSSIMKPKRDGYMFLKAE, |
| | MLTGPPARVPAVPFDLHFCRSSIMKPKRDGYMFLKAES, |
| | LTGPPARVPAVPFDLHFCRSSIMKPKRDGYMFLKAESK, |
| | TGPPARVPAVPFDLHFCRSSIMKPKRDGYMFLKAESKI, |
| | GPPARVPAVPFDLHFCRSSIMKPKRDGYMFLKAESKIM, |
| | PPARVPAVPFDLHFCRSSIMKPKRDGYMFLKAESKIMF, |
| | PARVPAVPFDLHFCRSSIMKPKRDGYMFLKAESKIMFA, |
| | ARVPAVPFDLHFCRSSIMKPKRDGYMFLKAESKIMFAT, |
| | RVPAVPFDLHFCRSSIMKPKRDGYMFLKAESKIMFATL, |
| | VPAVPFDLHFCRSSIMKPKRDGYMFLKAESKIMFATLQ, |
| | PAVPFDLHFCRSSIMKPKRDGYMFLKAESKIMFATLQR, |
| | AVPFDLHFCRSSIMKPKRDGYMFLKAESKIMFATLQRS, |
| | VPFDLHFCRSSIMKPKRDGYMFLKAESKIMFATLQRSS, |
| | PFDLHFCRSSIMKPKRDGYMFLKAESKIMFATLQRSSL, |
| | FDLHFCRSSIMKPKRDGYMFLKAESKIMFATLQRSSLW, |
| | DLHFCRSSIMKPKRDGYMFLKAESKIMFATLQRSSLWC, |
| | LHFCRSSIMKPKRDGYMFLKAESKIMFATLQRSSLWCL, |
| | HFCRSSIMKPKRDGYMFLKAESKIMFATLQRSSLWCLC, |
| | FCRSSIMKPKRDGYMFLKAESKIMFATLQRSSLWCLCS, |
| | CRSSIMKPKRDGYMFLKAESKIMFATLQRSSLWCLCSN, |
| | RSSIMKPKRDGYMFLKAESKIMFATLQRSSLWCLCSNH |
| 39 mers | EPCSMLTGPPARVPAVPFDLHFCRSSIMKPKRDGYMFLK, |
| | PCSMLTGPPARVPAVPFDLHFCRSSIMKPKRDGYMFLKA, |
| | CSMLTGPPARVPAVPFDLHFCRSSIMKPKRDGYMFLKAE, |
| | SMLTGPPARVPAVPFDLHFCRSSIMKPKRDGYMFLKAES, |
| | MLTGPPARVPAVPFDLHFCRSSIMKPKRDGYMFLKAESK, |
| | LTGPPARVPAVPFDLHFCRSSIMKPKRDGYMFLKAESKI, |
| | TGPPARVPAVPFDLHFCRSSIMKPKRDGYMFLKAESKIM, |
| | GPPARVPAVPFDLHFCRSSIMKPKRDGYMFLKAESKIMF, |
| | PPARVPAVPFDLHFCRSSIMKPKRDGYMFLKAESKIMFA, |
| | PARVPAVPFDLHFCRSSIMKPKRDGYMFLKAESKIMFAT, |
| | ARVPAVPFDLHFCRSSIMKPKRDGYMFLKAESKIMFATL, |
| | RVPAVPFDLHFCRSSIMKPKRDGYMFLKAESKIMFATLQ, |
| | VPAVPFDLHFCRSSIMKPKRDGYMFLKAESKIMFATLQR, |
| | PAVPFDLHFCRSSIMKPKRDGYMFLKAESKIMFATLQRS, |
| | AVPFDLHFCRSSIMKPKRDGYMFLKAESKIMFATLQRSS, |
| | VPFDLHFCRSSIMKPKRDGYMFLKAESKIMFATLQRSSL, |
| | PFDLHFCRSSIMKPKRDGYMFLKAESKIMFATLQRSSLW, |
| | FDLHFCRSSIMKPKRDGYMFLKAESKIMFATLQRSSLWC, |
| | DLHFCRSSIMKPKRDGYMFLKAESKIMFATLQRSSLWCL, |
| | LHFCRSSIMKPKRDGYMFLKAESKIMFATLQRSSLWCLC, |
| | HFCRSSIMKPKRDGYMFLKAESKIMFATLQRSSLWCLCS, |
| | FCRSSIMKPKRDGYMFLKAESKIMFATLQRSSLWCLCSN, |
| | CRSSIMKPKRDGYMFLKAESKIMFATLQRSSLWCLCSNH |
| 40 mers | EPCSMLTGPPARVPAVPFDLHFCRSSIMKPKRDGYMFLKA, |
| | PCSMLTGPPARVPAVPFDLHFCRSSIMKPKRDGYMFLKAE, |
| | CSMLTGPPARVPAVPFDLHFCRSSIMKPKRDGYMFLKAES, |
| | SMLTGPPARVPAVPFDLHFCRSSIMKPKRDGYMFLKAESK, |
| | MLTGPPARVPAVPFDLHFCRSSIMKPKRDGYMFLKAESKI, |
| | LTGPPARVPAVPFDLHFCRSSIMKPKRDGYMFLKAESKIM, |
| | TGPPARVPAVPFDLHFCRSSIMKPKRDGYMFLKAESKIMF, |
| | GPPARVPAVPFDLHFCRSSIMKPKRDGYMFLKAESKIMFA, |
| | PPARVPAVPFDLHFCRSSIMKPKRDGYMFLKAESKIMFAT, |
| | PARVPAVPFDLHFCRSSIMKPKRDGYMFLKAESKIMFATL, |
| | ARVPAVPFDLHFCRSSIMKPKRDGYMFLKAESKIMFATLQ, |
| | RVPAVPFDLHFCRSSIMKPKRDGYMFLKAESKIMFATLQR, |
| | VPAVPFDLHFCRSSIMKPKRDGYMFLKAESKIMFATLQRS, |
| | PAVPFDLHFCRSSIMKPKRDGYMFLKAESKIMFATLQRSS, |
| | AVPFDLHFCRSSIMKPKRDGYMFLKAESKIMFATLQRSSL, |
| | VPFDLHFCRSSIMKPKRDGYMFLKAESKIMFATLQRSSLW, |
| | PFDLHFCRSSIMKPKRDGYMFLKAESKIMFATLQRSSLWC, |
| | FDLHFCRSSIMKPKRDGYMFLKAESKIMFATLQRSSLWCL, |
| | DLHFCRSSIMKPKRDGYMFLKAESKIMFATLQRSSLWCLC, |
| | LHFCRSSIMKPKRDGYMFLKAESKIMFATLQRSSLWCLCS, |
| | HFCRSSIMKPKRDGYMFLKAESKIMFATLQRSSLWCLCSN, |
| | FCRSSIMKPKRDGYMFLKAESKIMFATLQRSSLWCLCSNH |

### Table 2 Below Lists Exemplary Selected Peptides

TABLE 2

| | Exemplary | Mutation Sequence | | |
|---|---|---|---|---|
| | Protein | Context | Peptides (HLA allele | |
| Gene | Change | FRAMESHIFT¹ | example(s)) | Exemplary Diseases |
| GATA3 | L328fs | AQAKAVCSQESRDVL | CLQCLWALL (A02.01) | Breast Cancer |
| | N334fs | CELSDHHNHTLEEEC | CQWGPCLQCL (A02.01) | |
| | | QWGPCLQCLWALLQ | QWGPCLQCL (A24.02) | |
| | | ASQY* | QWGPCLQCLW (A24.02) | |
| GATA3 | H400fs | PGRPLQTHVLPEPHLA | AIQPVLWTT (A02.01) | Breast Cancer |
| | S408fs | LQPLQPHADHAHADA | ALQPLQPHA (A02.01) | |
| | S408fs | PAIQPVLWTTPPLQHG | DLHFCRSSIM (B08.01) | |
| | S430fs | HRHGLEPCSMLTGPP | EPHLALQPL (B07.02, B08.01) | |
| | H434fs | ARVPAVPFDLHFCRSS | ESKIMFATL (B08.01) | |
| | H435fs | IMKPKRDGYMFLKAE | FATLQRSSL (B07.02, B08.01) | |
| | | SKIMFATLQRSSLWCL | FLKAESKIM (B08.01) | |
| | | CSNH* | FLKAESKIMF (B08.01) | |
| | | | GPPARVPAV (B07.02) | |
| | | | IMKPKRDGYM (B08.01) | |
| | | | KIMFATLQR (A03.01) | |
| | | | KPKRDGYMF (B07.02) | |
| | | | KPKRDGYMFL (B07.02) | |
| | | | LHFCRSSIM (B08.01) | |
| | | | LQHGHRHGL (B08.01) | |
| | | | MFATLQRSSL (B07.02, | |
| | | | B08.01) | |
| | | | MFLKAESKI (A24.02) | |
| | | | MLTGPPARV (A02.01) | |
| | | | QPVLWTTPPL (B07.02) | |
| | | | SMLTGPPARV (A02.01) | |
| | | | TLQRSSLWCL (A02.01) | |
| | | | VLPEPHLAL (A02.01) | |
| | | | VPAVPFDLHF (B07.02) | |
| | | | YMFLKAESK (A03.01) | |
| | | | YMFLKAESKI (A02.01, | |
| | | | A03.01, A24.02, B08.01) | |

¹Underlined AAs represent non-native AAs

TABLE 3

| | | | | |
|---|---|---|---|---|
| | Exemplary | | | |
| | Protein | Mutation Sequence | | |
| Gene | Change | Context | Peptides (HLA allele example(s)) | Exemplary Diseases |

Table 3A

| | | POINT MUTATIONS¹ | | |
|---|---|---|---|---|
| AKT1 | E17K | MSDVAIVKEGWLHKR | KYIKTWRPRY (A24.02) | BRCA, CESC, HNSC, |
| | | GKYIKTWRPRYFLLK | WLHKRGKYI (A02.01, B07.02, | LUSC, PRAD, SKCM, |
| | | NDGTFIGYKERPQDV | B08.01) | THCA |
| | | DQREAPLNNFSVAQC | WLHKRGKYIK (A03.01) | |
| | | QLMKTER | | |
| ANAPC1 | T537A | TMLVLEGSGNLVLYT | APKPLSKLL (B07.02) | GBM, LUSC, PAAD, |
| | | GVVRVGKVFIPGLPAP | GVSAPKPLSK (A03.01) | PRAD, SKCM |
| | | SLTMSNTMPRPSTPLD | VSAPKPLSK (A03.01) | |
| | | GVSAPKPLSKLLGSLD | | |
| | | EVVLLSPVPELRDSSK | | |
| | | LHDSLYNEDCTFQQL | | |
| | | GTYIHSI | | |
| FGFR3 | S249C | HRIGGIKLRHQQWSL | CPHRPILQA (B07.02) | BLCA, HNSC, KIRP, |
| | | VMESVVPSDRGNYTC | | LUSC |
| | | VVENKFGSIRQTYTLD | | |
| | | VLERCPHRPILQAGLP | | |
| | | ANQTAVLGSDVEFHC | | |
| | | KVYSDAQPHIQWLKH | | |
| | | VEVNGSKVG | | |
| FRG1B | I10T | MREPIYMHSTMVFLP | KLSDSRTAL (A02.01, B07.02, | KIRP, PRAD, SKCM |
| | | WELHTKKGPSPPEQF | B08.01) | |
| | | MAVKLSDSRTALKSG | KLSDSRTALK (A03.01) | |
| | | YGKYLGINSDELVGH | LSDSRTALK (A01.01, A03.01) | |
| | | SDAIGPREQWEPVFQ | RTALKSGYGK (A03.01) | |
| | | NGKMALLASNSCFIR | TALKSGYGK (A03.01) | |
| FRG1B | L52S | AVKLSDSRIALKSGYG | ALSASNSCF (A02.01, A24.02, | GBM, KIRP, PRAD, |
| | | KYLGINSDELVGHSD | B07.02) | SKCM |
| | | AIGPREQWEPVFQNG | ALSASNSCFI (A02.01) | |
| | | KMALSASNSCFIRCNE | FQNGKMALSA (A02.01, B08.01) | |
| | | AGDIEAKSKTAGEEE | | |
| | | MIKIRSCAEKETKKKD | | |
| | | DIPEEDKG | | |
| HER2 | L755S | AMPNQAQMRILKETE | KVSRENTSPK (A03.01) | BRCA |
| | (Resistance) | LRKVKVLGSGAFGTV | | |
| | | YKGIWIPDGENVKIPV | | |
| | | AIKVSRENTSPKANKE | | |
| | | ILDEAYVMAGVGSPY | | |
| | | VSRLLGICLTSTVQLV | | |
| | | TQLMPYGC | | |
| IDH1 | R132G | RVEEFKLKQMWKSPN | KPIIIGGHAY (B07.02) | BLCA, BRCA, CRC, |
| | | GTIRNILGGTVFREAII | | GBM, HNSC, LUAD, |
| | | CKNIPRLVSGWVKPIII | | PAAD, PRAD, UCEC |
| | | GGHAYGDQYRATDF | | |
| | | VVPGPGKVEITYTPSD | | |
| | | GTQKVTYLVHNFEEG | | |
| | | GGVAMGM | | |
| KRAS | G12C | MTEYKLVVVGACGV | KLVVVGACGV (A02.01) | BRCA, CESC, CRC, |
| | | GKSALTIQLIQNHFVD | LVVVGACGV (A02.01) | HNSC, LUAD, PAAD, |
| | | EYDPTIEDSYRKQVVI | VVGACGVGK (A03.01, A11.01) | UCEC |
| | | DGETCLLDILDTAGQE | VVVGACGVGK (A03.01) | |
| KRAS | G12D | MTEYKLVVVGADGV | VVGADGVGK (A11.01) | BLCA, BRCA, CESC, |
| | | GKSALTIQLIQNHFVD | VVVGADGVGK (A11.01) | CRC, GBM, HNSC, |
| | | EYDPTIEDSYRKQVVI | KLVVVGADGV (A02.01) | KIRP, LIHC, LUAD, |
| | | DGETCLLDILDTAGQE | LVVVGADGV (A02.01) | PAAD, SKCM, UCEC |
| KRAS | G12V | MTEYKLVVVGAVGV | KLVVVGAVGV (A02.01) | BRCA, CESC, CRC, |
| | | GKSALTIQLIQNHFVD | LVVVGAVGV (A02.01) | LUAD, PAAD, THCA, |
| | | EYDPTIEDSYRKQVVI | VVGAVGVGK (A03.01, A11.01) | UCEC |
| | | DGETCLLDILDTAGQE | VVVGAVGVGK (A03.01, A11.01) | |
| KRAS | Q61H | AGGVGKSALTIQLIQN | ILDTAGHEEY (A01.01) | CRC, LUSC, PAAD, |
| | | HFVDEYDPTIEDSYRK | | SKCM, UCEC |
| | | QVVIDGETCLLDILDT | | |
| | | AGHEEYSAMRDQYM | | |
| | | RTGEGFLCVFAINNTK | | |
| | | SFEDIHHYREQIKRVK | | |
| | | DSEDVPM | | |
| KRAS | Q61L | AGGVGKSALTIQLIQN | ILDTAGLEEY (A01.01) | CRC, GBM, HNSC, |
| | | HFVDEYDPTIEDSYRK | LLDILDTAGL (A02.01) | LUAD, SKCM, UCEC |
| | | QVVIDGETCLLDILDT | | |
| | | AGLEEYSAMRDQYM | | |
| | | RTGEGFLCVFAINNTK | | |
| | | SFEDIHHYREQIKRVK | | |
| | | DSEDVPM | | |
| NRAS | Q61K | AGGVGKSALTIQLIQN | ILDTAGKEEY (A01.01) | BLCA, CRC, LIHC, |
| | | HFVDEYDPTIEDSYRK | | LUAD, LUSC, SKCM, |
| | | QVVIDGETCLLDILDT | | THCA, UCEC |
| | | AGKEEYSAMRDQYM | | |
| | | RTGEGFLCVFAINNSK | | |
| | | SFADINLYREQIKRVK | | |
| | | DSDDVPM | | |
| NRAS | Q61R | AGGVGKSALTIQLIQN | ILDTAGREEY (A01.01) | BLCA, CRC, LUSC, |
| | | HFVDEYDPTIEDSYRK | | PAAD, PRAD, SKCM, |
| | | QVVIDGETCLLDILDT | | THCA, UCEC |
| | | AGREEYSAMRDQYM | | |
| | | RTGEGFLCVFAINNSK | | |
| | | SFADINLYREQIKRVK | | |
| | | DSDDVPM | | |
| PIK3CA | E542K | IEEHANWSVSREAGFS | AISTRDPLSK (A03.01) | BLCA, BRCA, CESC, |
| | | YSHAGLSNRLARDNE | | CRC, GBM, HNSC, |
| | | LRENDKEQLKAISTRD | | KIRC, KIRP, LIHC, |
| | | PLSKITEQEKDFLWSH | | LUAD, LUSC, PRAD, |
| | | RHYCVTIPEILPKLLLS | | UCEC |
| | | VKWNSRDEVAQMYC | | |
| | | LVKDWPP | | |
| PTEN | R130Q | KFNCRVAQYPFEDHN | QTGVMICAY (A01.01) | BRCA, CESC, CRC, |
| | | PPQLELIKPFCEDLDQ | | GBM, KIRC, LUSC, |
| | | WLSEDDNHVAAIHCK | | UCEC |
| | | AGKGQTGVMICAYLL | | |
| | | HRGKFLKAQEALDFY | | |
| | | GEVRTRDKKGVTIPSQ | | |
| | | RRYVYYYSY | | |
| RAC1 | P29S | MQAIKCVVVGDGAV | FSGEYIPTV (A02.01) | Melanoma |
| | | GKTCLLISYTTNAFSG | TTNAFSGEY (A01.01) | |
| | | EYIPTVFDNYSANVM | YTTNAFSGEY (A01.01) | |
| | | VDGKPVNLGLWDTA | | |
| | | GQEDYDRLRPLSYPQ | | |
| | | TVGET | | |
| SF3B1 | K700E | AVCKSKKSWQARHT | GLVDEQQEV (A02.01) | AML associated with |
| | | GIKIVQQIAILMGCAIL | | MDS; Chronic |
| | | PHLRSLVEIIEHGLVD | | lymphocytic leukemia- |
| | | EQQEVRTISALAIAAL | | small lymphocytic |
| | | AEAATPYGIESFDSVL | | lymphoma; |
| | | KPLWKGIRQHRGKGL | | Myelodysplastic |
| | | AAFLKAI | | syndrome; AML; |
| | | | | Luminal NS carcinoma |
| | | | | of breast; Chronic |
| | | | | myeloid leukemia; |
| | | | | Ductal carcinoma of |
| | | | | pancreas; Chronic |
| | | | | myelomonocytic |
| | | | | leukemia; Chronic |
| | | | | lymphocytic leukemia- |
| | | | | small lymphocytic |
| | | | | lymphoma; |
| | | | | Myelofibrosis; |
| | | | | Myelodysplastic |
| | | | | syndrome; PRAD; |
| | | | | Essential |
| | | | | thrombocythaemia; |
| | | | | Medullomyoblastoma |
| SPOP | F133L | YLSLYLLLVSCPKSEV | FVQGKDWGL (A02.01, B08.01) | PRAD |
| | | RAKFKFSILNAKGEET | | |
| | | KAMESQRAYRFVQG | | |
| | | KDWGLKKFIRRDFLL | | |
| | | DEANGLLPDDKLTLF | | |
| | | CEVSVVQDSVNISGQ | | |
| | | NTMNMVKVPE | | |
| SPOP | F133V | YLSLYLLLVSCPKSEV | FVQGKDWGV (A02.01) | PRAD |
| | | RAKFKFSILNAKGEET | | |
| | | KAMESQRAYRFVQG | | |
| | | KDWGVKKFIRRDFLL | | |
| | | DEANGLLPDDKLTLF | | |
| | | CEVSVVQDSVNISGQ | | |
| | | NTMNMVKVPE | | |
| TP53 | G245S | IRVEGNLRVEYLDDR | CMGSMNRRPI (A02.01, B08.01) | BLCA, BRCA, CRC, |
| | | NTFRHSVVVPYEPPEV | GSMNRRPIL (B08.01) | GBM, HNSC, LUSC, |
| | | GSDCTTIHYNYMCNS | MGSMNRRPI (B08.01) | PAAD, PRAD |
| | | SCMGSMNRRPILTIITL | MGSMNRRPIL (B08.01) | |
| | | EDSSGNLLGRNSFEVR | SMNRRPILTI (A02.01, A24.02, | |
| | | VCACPGRDRRTEEEN | B08.01) | |
| | | LRKKGEP | | |
| TP53 | R248Q | EGNLRVEYLDDRNTF | CMGGMNQRPI (A02.01, B08.01) | BLCA, BRCA, CRC, |
| | | RHSVVVPYEPPEVGS | GMNQRPILTI (A02.01, B08.01) | GBM, HNSC, KIRC, |
| | | DCTTIHYNYMCNSSC | NQRPILTII (A02.01, B08.01) | LIHC, LUSC, PAAD, |
| | | MGGMNQRPILTIITLE | | PRAD, UCEC |
| | | DSSGNLLGRNSFEVR | | |
| | | VCACPGRDRRTEEEN | | |
| | | LRKKGEPHHE | | |
| TP53 | R248W | EGNLRVEYLDDRNTF | CMGGMNWRPI (A02.01, A24.02, | BLCA, BRCA, CRC, |
| | | RHSVVVPYEPPEVGS | B08.01) | GBM, HNSC, LIHC, |
| | | DCTTIHYNYMCNSSC | GMNWRPILTI (A02.01, B08.01) | LUSC, PAAD, SKCM, |
| | | MGGMNWRPILTIITLE | MNWRPILTI (A02.01, A24.02, | UCEC |
| | | DSSGNLLGRNSFEVR | B08.01) | |
| | | VCACPGRDRRTEEEN | MNWRPILTII (A02.01, A24.02) | |
| | | LRKKGEPHHE | | |
| TP53 | R273C | PEVGSDCTTIHYNYM | NSFEVCVCA (A02.01) | BLCA, BRCA, CRC, |
| | | CNSSCMGGMNRRPIL | | GBM, HNSC, LUSC, |
| | | TIITLEDSSGNLLGRNS | | PAAD, UCEC |
| | | FEVCVCACPGRDRRT | | |
| | | EEENLRKKGEPHHELP | | |
| | | PGSTKRALPNNTSSSP | | |
| | | QPKKKPL | | |
| TP53 | R273H | PEVGSDCTTIHYNYM | NSFEVHVCA (A02.01) | BRCA, CRC, GBM, |
| | | CNSSCMGGMNRRPIL | | HNSC, LIHC, LUSC, |
| | | TIITLEDSSGNLLGRNS | | PAAD, UCEC |
| | | FEVHVCACPGRDRRT | | |
| | | EEENLRKKGEPHHELP | | |
| | | PGSTKRALPNNTSSSP | | |
| | | QPKKKPL | | |
| TP53 | Y220C | TEVVRRCPHHERCSD | VVPCEPPEV (A02.01) | BLCA, BRCA, GBM, |
| | | SDGLAPPQHLIRVEGN | VVVPCEPPEV (A02.01) | HNSC, LIHC, LUAD, |
| | | LRVEYLDDRNTFRHS | | LUSC, PAAD, SKCM, |
| | | VVVPCEPPEVGSDCTT | | UCEC |
| | | IHYNYMCNSSCMGG | | |
| | | MNRRPILTIITLEDSSG | | |
| | | NLLGRNSF | | |

Table 3B

| | | MSI-ASSOCIATED | | |
|---|---|---|---|---|
| | | FRAMESHIFTS¹ | | |
| MSH6 | F1088fs; +1 | YNFDKNYKDWQSAV | ILLPEDTPPL (A02.01) | MSI + CRC, MSI + |
| | | ECIAVLDVLLCLANYS | LLPEDTPPL (A02.01) | Uterine/Endometrium |
| | | RGGDGPMCRPVILLPE | | Cancer, MSI + Stomach |
| | | DTPPLLRA | | Cancer, Lynch |
| | | | | syndrome |

Table 3C

| | | FRAMESHIFT¹ | | |
|---|---|---|---|---|
| APC | F1354fs | AKFQQCHSTLEPNPA | APFRVNHAV (B07.02) | CRC, LUAD, UCEC, |
| | | DCRVLVYLQNQPGTK | CLADVLLSV (A02.01) | STAD |
| | | LLNFLQERNLPPKVVL | FLQERNLPPK (A03.01) | |
| | | RHPKVHLNTMFRRPH | HLIVLRVVRL (A02.01, B08.01) | |
| | | SCLADVLLSVHLIVLR | HPKVHLNTM (B07.02, B08.01) | |
| | | VVRLPAPFRVNHAVE | HPKVHLNTMF (B07.02, B08.01) | |
| | | W* | KVHLNTMFR (A03.01) | |
| | | | KVHLNTMFRR (A03.01) | |
| | | | LPAPFRVNHA (B07.02) | |
| | | | MFRRPHSCL (B07.02, B08.01) | |
| | | | MFRRPHSCLA (B08.01) | |
| | | | NTMFRRPHSC (B08.01) | |
| | | | RPHSCLADV (B07.02) | |
| | | | RPHSCLADVL (B07.02) | |
| | | | RVVRLPAPFR (A03.01) | |
| | | | SVHLIVLRV (A02.01) | |
| | | | TMFRRPHSC (B08.01) | |
| | | | TMFRRPHSCL (A02.01, B08.01) | |
| | | | VLLSVHLIV (A02.01) | |
| | | | VLLSVHLIVL (A02.01) | |
| | | | VLRVVRLPA (B08.01) | |
| | | | VVRLPAPFR (A03.01) | |
| ARID1A | Y1324fs | ALGPHSRISCLPTQTR | AMPILPLPQL (A02.01) | STAD, UCEC, BLCA, |
| | | GCILLAATPRSSSSSSS | APLLAAPSPA (B07.02) | BRCA, LUSC, CESC, |
| | | NDMIPMAISSPPKAPL | APRTNFHSS (B07.02) | KIRC, UCS |
| | | LAAPSPASRLQCINSN | APRTNFHSSL (B07.02, B08.01) | |
| | | SRITSGQWMAHMALL | CPQPSPSLPA (B07.02) | |
| | | PSGTKGRCTACHTAL | GQWMAHMAL (A02.01) | |
| | | GRGSLSSSSCPQPSPSL | GQWMAHMALL (A02.01) | |
| | | PASNKLPSLPLSKMYT | HMALLPSGTK (A03.01) | |
| | | TSMAMPILPLPQLLLS | HTALGRGSL (B07.02) | |
| | | ADQQAAPRTNFHSSL | IPMAISSPP (B07.02) | |
| | | AETVSLHPLAPMPSKT | IPMAISSPPK (B07.02) | |
| | | CHHK* | KLPSLPLSK (A03.01) | |
| | | | KLPSLPLSKM (A02.01) | |
| | | | KMYTTSMAM (A02.01, A03.01) | |
| | | | LLAAPSPASR (A03.01) | |
| | | | LLLSADQQAA (A02.01) | |
| | | | LLSADQQAA (A02.01) | |
| | | | LPASNKLPS (B07.02) | |
| | | | LPASNKLPSL (B07.02, B08.01) | |
| | | | LPLPQLLLSA (B07.02) | |
| | | | LPSLPLSKM (B07.02) | |
| | | | LSKMYTTSM (B08.01) | |
| | | | MALLPSGTK (A03.01) | |
| | | | MPILPLPQL (B07.02) | |
| | | | MPILPLPQLL (B07.02) | |
| | | | MYTTSMAMPI (A24.02) | |
| | | | PMAISSPPK (A03.01) | |
| | | | QWMAHMALL (A24.02) | |
| | | | SKMYTTSMAM (B07.02) | |
| | | | SMAMPILPL (A02.01, B07.02, | |
| | | | B08.01) | |
| | | | SNKLPSLPL (B08.01) | |
| | | | SPASRLQCI (B07.02, B08.01) | |
| | | | SPPKAPLLAA (B07.02) | |
| | | | SPSLPASNKL (B07.02) | |
| | | | YTTSMAMPI (A02.01) | |
| | | | YTTSMAMPIL (A02.01) | |
| ARID1A | G1848fs | RSYRRMIHLWWTAQI | CLPGLTHPA (A02.01) | STAD, UCEC, BLCA, |
| | | SLGVCRSLTVACCTG | GLTHPAHQPL (A02.01) | BRCA, LUSC, CESC, |
| | | GLVGGTPLSISRPTSR | HPAHQPLGSM (B07.02) | KIRC, UCS |
| | | ARQSCCLPGLTHPAH | LTHPAHQPL (B07.02) | |
| | | QPLGSM* | RPTSRARQSC (B07.02) | |
| | | | RQSCCLPGL (A02.01) | |
| | | | TSRARQSCCL (B08.01) | |
| β2M | L13fs | QHSGRDVSLRGLSCA | ELLCVWVSSI (A02.01) | CRC, STAD, SKCM, |
| | | RATLSFWPGGYPAYS | EWKVKFPEL (B08.01) | HNSC |
| | | KDSGLLTSSSREWKV | KFPELLCVW (A24.02) | |
| | | KFPELLCVWVSSIRH* | LLCVWVSSI (A02.01) | |
| | | | LLTSSSREWK (A03.01) | |
| | | | LTSSSREWK (A03.01) | |
| | | | YPAYSKDSGL (B07.02) | |
| GATA3 | L328fs | AQAKAVCSQESRDVL | CLQCLWALL (A02.01) | Breast Cancer |
| | N334fs | CELSDHHNHTLEEEC | CQWGPCLQCL (A02.01) | |
| | | QWGPCLQCLWALLQ | QWGPCLQCL (A24.02) | |
| | | ASQY* | QWGPCLQCLW (A24.02) | |
| GATA3 | H400fs | PGRPLQTHVLPEPHLA | AIQPVLWTT (A02.01) | |
| | S408fs | LQPLQPHADHAHADA | ALQPLQPHA (A02.01) | |
| | S408fs | PAIQPVLWTTPPLQHG | DLHFCRSSIM (B08.01) | |
| | S430fs | HRHGLEPCSMLTGPP | EPHLALQPL (B07.02, B08.01) | |
| | H434fs | ARVPAVPFDLHFCRSS | ESKIMFATL (B08.01) | |
| | H435fs | IMKPKRDGYMFLKAE | FATLQRSSL (B07.02, B08.01) | |
| | | SKIMFATLQRSSLWCL | FLKAESKIM (B08.01) | |
| | | CSNH* | FLKAESKIMF (B08.01) | |
| | | | GPPARVPAV (B07.02) | |
| | | | IMKPKRDGYM (B08.01) | |
| | | | KIMFATLQR (A03.01) | |
| | | | KPKRDGYMF (B07.02) | |
| | | | KPKRDGYMFL (B07.02) | |
| | | | LHFCRSSIM (B08.01) | Breast Cancer |
| | | | LQHGHRHGL (B08.01) | |
| | | | MFATLQRSSL (B07.02, B08.01) | |
| | | | MFLKAESKI (A24.02) | |
| | | | MLTGPPARV (A02.01) | |
| | | | QPVLWTTPPL (B07.02) | |
| | | | SMLTGPPARV (A02.01) | |
| | | | TLQRSSLWCL (A02.01) | |
| | | | VLPEPHLAL (A02.01) | |
| | | | VPAVPFDLHF (B07.02) | |
| | | | YMFLKAESK (A03.01) | |
| | | | YMFLKAESKI (A02.01, A03.01, | |
| | | | A24.02, B08.01) | |
| MLL2 | P647fs | TRRCHCCPHLRSHPCP | APGPRGRTC (B07.02) | STAD, BLCA, CRC, |
| | L656fs | HHLRNHPRPHHLRHH | CLRSHTCPPR (A03.01) | HNSC, BRCA |
| | | ACHHHLRNCPHPHFL | CLWCHACLHR (A03.01) | |
| | | RHCTCPGRWRNRPSL | CPHLGSHPC (B07.02) | |
| | | RRLRSLLCLPHLNHHL | CPLGLKSPL (B07.02) | |
| | | FLHWRSRPCLHRKSH | CPRSCRCPH (B07.02) | |
| | | PHLLHLRRLYPHHLK | CPRSCRCPHL (B07.02, B08.01) | |
| | | HRPCPHHLKNLLCPR | CSLPLGNHPY (A01.01) | |
| | | HLRNCPLPRHLKHLA | GLRNRICPL (A02.01, B07.02, | |
| | | CLHHLRSHPCPLHLKS | B08.01) | |
| | | HPCLHHRRHLVCSHH | GLRSHTYLR (A03.01) | |
| | | LKSLLCPLHLRSLPFP | GLRSHTYLRR (A03.01) | |
| | | HHLRHHACPHHLRTR | GPRGRTCHPG (B07.02) | |
| | | LCPHHLKNHLCPPHL | HLGSHPCRL (B08.01) | |
| | | RYRAYPPCLWCHACL | HLRLHASPH (A03.01) | |
| | | HRLRNLPCPHRLRSLP | HLRSCPCSL (B07.02, B08.01) | |
| | | RPLHLRLHASPHHLRT | HLRTHLLPH (A03.01) | |
| | | PPHPHHLRTHLLPHHR | HLRTHLLPHH (A03.01) | |
| | | RTRSCPCRWRSHPCC | HLRYRAYPP (B08.01) | |
| | | HYLRSRNSAPGPRGR | HLRYRAYPPC (B08.01) | |
| | | TCHPGLRSRTCPPGLR | HPHHLRTHL (B07.02) | |
| | | SHTYLRRLRSHTCPPS | HPHHLRTHLL (B07.02, B08.01) | |
| | | LRSHAYALCLRSHTCP | HTYLRRLRSH (A03.01) | |
| | | PRLRDHICPLSLRNCT | LPCPHRLRSL (B07.02, B08.01) | |
| | | CPPRLRSRTCLLCLRS | LPHHRRTRSC (B07.02, B08.01) | |
| | | HACPPNLRNHTCPPSL | LPLGNHPYL (B07.02) | |
| | | RSHACPPGLRNRICPL | LPRPLHLRL (B07.02, B08.01) | |
| | | SLRSHPCPLGLKSPLR | NLRNHTCPP (B08.01) | |
| | | SQANALHLRSCPCSLP | PPRLRSRTCL (B07.02, B08.01) | |
| | | LGNHPYLPCLESQPCL | RLHASPHHL (A02.01) | |
| | | SLGNHLCPLCPRSCRC | RLHASPHHLR (A03.01) | |
| | | PHLGSHPCRLS* | RLRDHICPL (A02.01, B07.02, | |
| | | | B08.01) | |
| | | | RLRNLPCPH (A03.01) | |
| | | | RLRNLPCPHR (A03.01) | |
| | | | RLRSHTCPP (B08.01) | |
| | | | RLRSLPRPL (B07.02, B08.01) | |
| | | | RLRSLPRPLH (A03.01) | |
| | | | RLRSRTCLL (B07.02, B08.01) | |
| | | | RNRICPLSL (B07.02, B08.01) | |
| | | | RPLHLRLHA (B07.02) | |
| | | | RPLHLRLHAS (B07.02) | |
| | | | RSHACPPGLR (A03.01) | |
| | | | RSHACPPNLR (A03.01) | |
| | | | RSHAYALCLR (A03.01) | |
| | | | RSHPCCHYLR (A03.01) | |
| | | | RSHPCPLGLK (A03.01) | |
| | | | RSHTCPPSLR (A03.01) | |
| | | | RSLPRPLHLR (A03.01) | |
| | | | RSRTCLLCL (B07.02) | |
| | | | RSRTCLLCLR (A03.01) | |
| | | | RSRTCPPGL (B07.02) | |
| | | | RSRTCPPGLR (A03.01) | |
| | | | RTHLLPHHRR (A03.01) | |
| | | | RTRSCPCRWR (A03.01) | |
| | | | RYRAYPPCL (A24.02) | |
| | | | RYRAYPPCLW (A24.02) | |
| | | | SLGNHLCPL (A02.01, B07.02, | |
| | | | B08.01) | |
| | | | SLPLGNHPYL (A02.01) | |
| | | | SLPRPLHLRL (A02.01) | |
| | | | SLRNCTCPPR (A03.01) | |
| | | | SLRSHAYAL (A02.01, B07.02, | |
| | | | B08.01) | |
| | | | SLRSHPCPL (A02.01, B07.02, | |
| | | | B08.01) | |
| | | | SPHHLRTPP (B07.02) | |
| | | | SPHHLRTPPH (B07.02) | |
| | | | SPLRSQANAL (B07.02, B08.01) | |
| | | | YLRRLRSHTC (B08.01) | |
| | | | YLRSRNSAP (B08.01) | |
| | | | YLRSRNSAPG (B08.01) | |
| MLL2 | P2354fs | GPRSHPLPRLWHLLL | ALAPTLTHM (A02.01) | STAD, BLCA, CRC, |
| | | QVTQTSFALAPTLTH | ALAPTLTHML (A02.01) | HNSC, BRCA |
| | | MLSPH* | LLQVTQTSFA (A02.01) | |
| | | | LQVTQTSFAL (A02.01) | |
| | | | RLWHLLLQV (A02.01) | |
| | | | RLWHLLLQVT (A02.01) | |
| RNF43 | G659fs | PLGLVPWTRWCPQGK | CTQLARFFPI (A24.02) | STAD |
| | | PRFPAMSTTTATGTTT | FFPITPPVW (A24.02) | |
| | | TKSGSSGMAGSLAQK | FPITPPVWHI (B07.02) | |
| | | PESPSPGLLFLGHSPSQ | GPRMQLCTQL (B07.02, B08.01) | |
| | | SHLLLISKSPDPTQQPL | ITPPVWHIL (A24.02) | |
| | | RGGSLTHSAPGPSLSQ | LALGPRMQL (B07.02) | |
| | | PLAQLTPPASAPVPAV | MQLCTQLARF (A24.02) | |
| | | CSTCKNPASLPDTHRG | RFFPITPPV (A02.01, A24.02) | |
| | | KGGGVPPSPPLALGPR | RFFPITPPVW (A24.02) | |
| | | MQLCTQLARFFPITPP | RMQLCTQLA (A02.01) | |
| | | VWHILGPQRHTP* | RMQLCTQLAR (A03.01) | |
| | | | SPPLALGPRM (B07.02) | |
| | | | TQLARFFPI (A02.01, A24.02, | |
| | | | B08.01) | |
| SMAP1 | E169fs | KYEKKKYYDKNAIAI | KSRQNHLQL (B07.02) | MSI + CRC, MSI + |
| | | TNISSSDAPLQPLVSSP | ALKKLRSPL (B08.01, B07.02) | Uterine/Endometrium |
| | | SLQAAVDKNKLEKEK | HLQLKSCRRK (A03.01) | Cancer, MSI + Stomach |
| | | EKKRKRKREKRSQKS | KISNWSLKK (A03.01, A11.01) | Cancer |
| | | RQNHLQLKSCRRKISN | KISNWSLKKV (A03.01) | |
| | | WSLKKVPALKKLRSP | KLRSPLWIF (A24.02) | |
| | | LWIF | KSRQNHLQLK (A03.01) | |
| | | | NWSLKKVPAL (B08.01) | |
| | | | SLKKVPALK (A03.01, A11.01) | |
| | | | SLKKVPALKK (A03.01) | |
| | | | SQKSRQNHL (B08.01) | |
| | | | WSLKKVPAL (B08.01) | |
| | | | WSLKKVPALK (A03.01) | |
| TP53 | P58fs | CCPRTILNNGSLKTQV | KLPECQRLL (A02.01) | BRCA, CRC, LUAD, |
| | P72fs | QMKLPECQRLLPPWP | KPTRAATVSV (B07.02) | PRAD, HNSC, LUSC, |
| | G108fs | LHQQLLHRRPLHQPPP | LPPWPLHQQL (B07.02) | PAAD, STAD, BLCA, |
| | R110fs | GPCHLLSLPRKPTRAA | LPRKPTRAA (B07.02, B08.01) | OV, LIHC, SKCM, |
| | | TVSVWASCILGQPSL* | LPRKPTRAAT (B07.02) | UCEC, LAML, UCS, |
| | | | QQLLHRRPL (B08.01) | KICH, GBM, ACC |
| | | | RLLPPWPLH (A03.01) | |
| TP53 | P152fs | LARTPLPSTRCFANWP | APASAPWPST (B07.02) | BRCA, CRC, LUAD, |
| | | RPALCSCGLIPHPRPA | APWPSTSSH (B07.02) | PRAD, HNSC, LUSC, |
| | | PASAPWPSTSSHST* | RPAPASAPW (B07.02) | PAAD, STAD, BLCA, |
| | | | WPSTSSHST (B07.02) | OV, LIHC, SKCM, |
| | | | | UCEC, LAML, UCS, |
| | | | | KICH, GBM, ACC |
| UBR5 | K2120fs | SQGLYSSSASSGKCL | RVQNQGHLL (B07.02) | |
| | | MEVTVDRNCLEVLPT | | |
| | | KMSYAANLKNVMNM | | |
| | | QNRQKKKGKNSPCCQ | | |
| | | KKLRVQNQGHLLMIL | | |
| | | LHN* | | |
| VHL | L116fs | TRASPPRSSSAIAVRA | FLPISHCQCI (A02.01) | KIRC, KIRP |
| | G123fs | SCCPYGSTSTASRSPT | FWLTKLNYL (A24.02, B08.01) | |
| | | QRCRLARAAASTATE | HLSMLTDSL (A02.01) | |
| | | VTFGSSEMQGHTMGF | HTMGFWLTK (A03.01) | |
| | | WLTKLNYLCHLSMLT | HTMGFWLTKL (A02.01) | |
| | | DSLFLPISHCQCIL* | KLNYLCHLSM (A02.01) | |
| | | | LPISHCQCI (B07.02, B08.01) | |
| | | | LPISHCQCIL (B07.02, B08.01) | |
| | | | LTDSLFLPI (A01.01, A02.01) | |
| | | | LTKLNYLCHL (B08.01) | |
| | | | MLTDSLFLPI (A01.01, A02.01, | |
| | | | B08.01) | |
| | | | MQGHTMGFWL (A02.01) | |
| | | | NYLCHLSML (A24.02) | |
| | | | SMLTDSLFL (A02.01) | |
| | | | TMGFWLTKL (A02.01) | |
| | | | YLCHLSMLT (A02.01) | |

TABLE 3D

| | | INSERT¹ | | |
|---|---|---|---|---|
| HER2 | G776insYVM | LGSGAFGTVYKGIWIP | ILDEAYVMAY (A01.01) | Lung Cancer |
| | A | DGENVKIPVAIKVLRE | VMAYVMAGV (A02.01) | |
| | | NTSPKANKEILDEAYV | YVMAYVMAG (A02.01, B07.02, | |
| | | MAYVMAGVGSPYVS | B08.01) | |
| | | RLLGICLTSTVQLVTQ | YVMAYVMAGV (A02.01, | |
| | | LMPYGCLLDHVRENR | B07.02, B08.01) | |
| | | GRLGSQDLLNW | | |

¹Underlined AAs represent non-native AAs
²Bolded AAs represent native AAs of the amino acid sequence encoded by the second of the two fused genes
³Bolded and underlined AAs represent non-native AAs of the amino acid sequence encoded by the second of the two fused genes due to a frameshift.

[0329] A very common mutation to ibrutinib, a molecule targeting Bruton's Tyrosine Kinase (BTK) and used for CLL and certain lymphomas, is a Cysteine to Serine change at position 481 (C481S). This change produces a number of binding peptides which bind to a range of HLA molecules. The mutation is harbored in a region having the amino acid sequence: IFIITEYMANGSLLNYLREMRHR, the mutated Serine is underlined.

[0330] Exemplary neoantigenic peptides corresponding to the C481S mutation are presented in Table 34. The table also provides a list of HLA alleles, the encoded protein products of which can bind to the peptides. In some embodiments, the disclosure provides C481S neoepitopes for cancer therapeutics, such as, ANGSLLNY; ANGSLLNYL; ANGSLLNYLR; EYMANGSL; EYMANGSLLN; EYMANGSLLNY; GSLLNYLR; GSLLNYLREM; ITEYMANGS; ITEYMANGSL; ITEYMANGSLL; MANGSLLNYL; MANGSLLNYLR; NGSLLNYL; NGSLLNYL; SLLNYLREMR; TEYMANGSLL; TEYMANGSLLNY; YMANGSLL; and YMANGSLLN. Tables 35 and 3 provide exemplary neoantigen candidates corresponding to other cancer associated gene mutations. Table 36 provides a list of selected HLA-restricted BTK peptides for the purpose of this Application and the corresponding protein encoded by the HLA allele to which the mutant BTK peptide binds or is predicted to bind. Table 37 provides a list of selected BTK peptides and the corresponding preferred protein encoded by the HLA allele to which the peptide binds or is predicted to bind, as applicable to the context of this Application.

### Table 34 Below Lists Exemplary Neoantigenic Peptides Corresponding to the C481S Mutation

| BTK Peptides | HLA allele |
|---|---|
| ANGSLLNY | HLA-A36:01 |
| ANGSLLNYL | HLA-C15:02; HLA-008:01; HLA-006:02; |
| | HLA-A02:04; HLA-C12:02; |
| | HLA-B44:02; HLA-C17:01; HLA-B38:01 |
| ANGSLLNYLR | HLA-A74 :01, HLA-A31:01 |
| EYMANGSL | HLA-C14:02; HLA-C14:03; HLA-A24:02 |
| EYMANGSLL | HLA-A24:02; HLA-A23:01; HLA-A68:04; |
| | HLA-C14:02, HLA-C14:03, HLA-A33:03, |
| | HLA-004:01, HLA-B15:09, HLA-B38:01, |
| EYMANGSLLN | HLA-A23:01, HLA-A24:02 |
| EYMANGSLLNY | HLA-A29:02 |
| GSLLNYLR | HLA-A74:01, HLA-A31:01 |
| GSLLNYLREM | HLA-B57:01, HLA-B58:02 |
| ITEYMANGS | HLA-A01:01 |
| ITEYMANGSL | HLA-A01:01 |
| ITEYMANGSLL | HLA-A01:01 |
| MANGSLLNY | HLA-C02:02, HLA-C03:02, HLA-B53:01, |
| | HLA-C12:02, HLA-C12:03, HLA-A36:01, |
| | HLA-A26:01, HLA-A25:01, HLA-A03:01, |
| | HLA-B46:01, HLA-B15:03, HLA-A33:03, |
| | HLA-B35:03, HLA-A11:01, HLA-B15:01, |
| | HLA-B35:03, HLA-A29:02, HLA-B58:01, |
| | HLA-A30:02, HLA-B35:01 |
| MANGSLLNYL | HLA-C17:01, HLA-CO2:02, HLA-B35:01, |
| | HLA-C03:03, HLA-C08:01, HLA-B35:03, |
| | HLA-C12:02, HLA-C01:02, HLA-C03:04, |
| | HLA-C08:02 |
| MANGSLLNYLR | HLA-A33:03, HLA-A74:01 |
| NGSLLNYL | HLA-B14:02 |
| NGSLLNYLR | HLA-A68:01, HLA-A33:03, HLA-A31:01, |
| | HLA-A74:01 |
| SLLNYLREM | HLA-A02:04, HLA-A02:03, HLA-C03:02, |
| | HLA-A03:01, HLA-A32:01, HLA-A02:07, |
| | HLA-C14:03, HLA-C14:02, HLA-A31:01, |
| | HLA-A30:02, HLA-A74:01, HLA-C06:02, |
| | HLA-B15:03, HLA-B46:01, HLA-B13:02, |
| | HLA-A25:01, HLA-A29:02, HLA-C01:02, |
| | HLA-A02:01 |
| SLLNYLREMR | HLA-A74:01, HLA-A31:01 |
| TEYMANGSL | HLA-B14:02, HLA-B49:01, HLA-B44:03, |
| | HLA-B44:02, HLA-B37:01, HLA-B15:09, |
| | HLA-B41:01, HLA-B50:01, HLA-B18:01, |
| | HLA-B40:01, HLA-B40:02 |
| TEYMANGSLL | HLA-B40:02, HLA-B44:03, HLA-B49:01, |
| | HLA-B44:02, HLA-B49:01 |
| TEYMANGSLLNY | HLA-B44:03 |
| YMANGSLL | HLA-A01:01, HLA-C02:02, HLA-C04:01, |
| | HLA-C14:02, HLA-C14:03, HLA-C03:02, |
| | HLA-C17:01, HLA-C03:03, HLA-C03:04, |
| | HLA-B15:09 |
| YMANGSLLN | HLA-A01:01, HLA-A29:02 |
| YMANGSLLNY | HLA-A29:02, HLA-A36:01, HLA-B46:01, |
| | HLA-A25:01, HLA-B15:01, HLA-A26:01, |
| | HLA-A30:02, HLA-A32:01 |

TABLES 35
provide exemplary neoantigen candidates corresponding to other cancer associated gene mutations

| | | | | |
|---|---|---|---|---|
| | Exemplary | | | |
| | Protein | Mutation Sequence | Peptides (HLA allele | |
| Gene | Change | Context | example(s)) | Exemplary Diseases |

TABLE 35A

| | | POINT MUTATION ¹ | | |
|---|---|---|---|---|
| ABL1 | E255K | VADGLITTLHYPAPKR | GQYGKVYEG (A02.01) | Chronic myeloid |
| | | NKPTVYGVSPNYDKW | GQYGKVYEGV | leukemia (CML), |
| | | EMERTDITMKHKLGG | (A02.01) | Acute lymphocytic |
| | | GQYGKVYEGVWKKY | KLGGGQYGK (A03.01) | leukemia (ALL), |
| | | SLTVAVKTLKEDTME | KLGGGQYGKV | Gastrointestinal |
| | | VEEFLKEAAVMKEIK | (A02.01) | stromal tumors (GIST) |
| | | HPNLVQLLGVC | KVYEGVWKK (A02.01, | |
| | | | A03.01) | |
| | | | KVYEGVWKKY | |
| | | | (A03.01) | |
| | | | QYGKVYEGV (A24.02) | |
| | | | QYGKVYEGVW | |
| | | | (A24.02) | |
| ABL1 | E255V | VADGLITTLHYPAPKR | GQYGVVYEG (A02.01) | Chronic myeloid |
| | | NKPTVYGVSPNYDKW | GQYGVVYEGV | leukemia (CML), |
| | | EMERTDITMKHKLGG | (A02.01) | Acute lymphocytic |
| | | GQYGVVYEGVWKKY | KLGGGQYGV (A02.01) | leukemia (ALL), |
| | | SLTVAVKTLKEDTME | KLGGGQYGVV | Gastrointestinal |
| | | VEEFLKEAAVMKEIK | (A02. 01) | stromal tumors (GIST) |
| | | HPNLVQLLGVC | QYGVVYEGV (A24.02) | |
| | | | QYGVVYEGVW | |
| | | | (A24.02) | |
| | | | VVYEGVWKK (A02.01, | |
| | | | A03.01) | |
| | | | VVYEGVWKKY | |
| | | | (A03.01) | |
| ABL1 | M351T | LLGVCTREPPFYIITEF | ATQISSATEY (A01.01) | Chronic myeloid |
| | | MTYGNLLDYLRECNR | ISSATEYLEK (A03.01) | leukemia (CML), |
| | | QEVNAVVLLYMATQI | SSATEYLEK (A03.01) | Acute lymphocytic |
| | | SSATEYLEKKNFIHRD | TQISSATEYL (A02.01) | leukemia (ALL), |
| | | LAARNCLVGENHLVK | YMATQISSAT (A02.01) | Gastrointestinal |
| | | VADFGLSRLMTGDTY | | stromal tumors (GIST) |
| | | TAHAGAKF | | |
| ABL1 | T315I | SLTVAVKTLKEDTME | FYIIIEFMTY (A24.02) | Chronic myeloid |
| | | VEEFLKEAAVMKEIK | IIEFMTYGNL (A02.01) | leukemia (CML), |
| | | HPNLVQLLGVCTREPP | IIIEFMTYG (A02.01) | Acute lymphocytic |
| | | FYIIIEFMTYGNLLDYL | IIIEFMTYGN (A02.01) | leukemia (ALL), |
| | | RECNRQEVNAVVLLY | YIIIEFMTYG (A02.01) | Gastrointestinal |
| | | MATQISSAMEYLEKK | | stromal tumors (GIST) |
| | | NFIHRDLA | | |
| ABL1 | Y253H | STVADGLITTLHYPAP | GQHGEVYEGV | Chronic myeloid |
| | | KRNKPTVYGVSPNYD | (A02.01) | leukemia (CML), |
| | | KWEMERTDITMKHKL | KLGGGQHGEV | Acute lymphocytic |
| | | GGGQHGEVYEGVWK | (A02.01) | leukemia (ALL), |
| | | KYSLTVAVKTLKEDT | | Gastrointestinal |
| | | MEVEEFLKEAAVMKE | | stromal tumors (GIST) |
| | | IKHPNLVQLLG | | |
| ALK | G1269A | SSLAMLDLLHVARDI | KIADFGMAR (A03.01) | NSCLC |
| | | ACGCQYLEENHFIHR | RVAKIADFGM | |
| | | DIAARNCLLTCPGPGR | (A02.01, B07.02) | |
| | | VAKIADFGMARDIYR | | |
| | | ASYYRKGGCAMLPVK | | |
| | | WMPPEAFMEGIFTSKT | | |
| | | DTWSFGVLL | | |
| ALK | L1196M | QVAVKTLPEVCSEQD | FILMELMAGG | NSCLC |
| | | ELDFLMEALIISKFNH | (A02.01) | |
| | | QNIVRCIGVSLQSLPRF | ILMELMAGG (A02.01) | |
| | | ILMELMAGGDLKSFL | ILMELMAGGD | |
| | | RETRPRPSQPSSLAML | (A02.01) | |
| | | DLLHVARDIACGCQY | LMELMAGGDL | |
| | | LEENHFI | (A02.01) | |
| | | | LPRFILMEL (B07.02, | |
| | | | B08.01) | |
| | | | LPRFILMELM (B07.02) | |
| | | | LQSLPRFILM (A02.01, | |
| | | | B08.01) | |
| | | | SLPRFILMEL (A02.01, | |
| | | | A24.02, B07.02, B08.01) | |
| BRAF | V600E | MIKLIDIARQTAQGMD | LATEKSRWS (A02.01, | CRC, GBM, KIRP, |
| | | YLHAKSIIHRDLKSNN | B08.01) | LUAD, SKCM, |
| | | IFLHEDLTVKIGDFGL | LATEKSRWSG | THCA |
| | | ATEKSRWSGSHQFEQ | (A02.01, B08.01) | |
| | | LSGSILWMAPEVIRMQ | | |
| | | DKNPYSFQSDVYAFGI | | |
| | | VLYELM | | |
| BTK | C481S | MIKEGSMSEDEFIEEA | EYMANGSLL (A24.02) | BTK |
| | | KVMMNLSHEKLVQL | | |
| | | YGVCTKQRPIFIITEY | | |
| | | MANGSLLNYLREMRH | | |
| | | RFQTQQLLEMCKDVC | | |
| | | EAMEYLESKQFLHRD | | |
| | | LAARNCLVND | | |
| EEF1B2 | S43G | MGFGDLKSPAGLQVL | GPPPADLCHAL | BLCA, KIRP, PRAD, |
| | | NDYLADKSYIEGYVPS | (B07.02) | SKCM |
| | | QADVAVFEAVSGPPP | | |
| | | ADLCHALRWYNHIKS | | |
| | | YEKEKASLPGVKKAL | | |
| | | GKYGPADVEDTTGSG | | |
| | | AT | | |
| ERBB3 | V104M | ERCEVVMGNLEIVLT | | CRC, Stomach Cancer |
| | | GHNADLSFLQWIREV | | |
| | | TGYVLVAMNEFSTLP | | |
| | | LPNLRMVRGTQVYDG | | |
| | | KFAIFVMLNYNTNSSH | | |
| | | ALRQLRLTQLTEILSG | | |
| | | GVYIEKNDK | | |
| ESR1 | D538G | HLMAKAGLTLQQQH | GLLLEMLDA (A02.01) | Breast Cancer |
| | | QRLAQLLLILSHIRHM | LYGLLLEML (A24.02) | |
| | | SNKGMEHLYSMKCK | NVVPLYGLL (A02.01) | |
| | | NVVPLYGLLLEMLDA | PLYGLLLEM (A02.01) | |
| | | HRLHAPTSRGGASVE | PLYGLLLEML (A02.01, | |
| | | ETDQSHLATAGSTSSH | A24.02) | |
| | | SLQKYYITGEA | VPLYGLLLEM (B07.02) | |
| | | | VVPLYGLLL (A02.01, | |
| | | | A24.02) | |
| ESR1 | S463P | NQGKCVEGMVEIFDM | FLPSTLKSL (A02.01, | Breast Cancer |
| | | LLATSSRFRMMNLQG | A24.02, B08.01) | |
| | | EEFVCLKSIILLNSGVY | GVYTFLPST (A02.01) | |
| | | TFLPSTLKSLEEKDHIH | GVYTFLPSTL (A02.01, | |
| | | RVLDKITDTLIHLMAK | A24.02) | |
| | | AGLTLQQQHQRLAQL | TFLPSTLKSL (A24.02) | |
| | | LLILSH | VYTFLPSTL (A24.02) | |
| | | | YTFLPSTLK (A03.01) | |
| ESR1 | Y537C | IHLMAKAGLTLQQQH | NVVPLCDLL (A02.01) | Breast Cancer |
| | | QRLAQLLLILSHIRHM | NVVPLCDLLL (A02.01) | |
| | | SNKGMEHLYSMKCK | PLCDLLLEM (A02.01) | |
| | | NVVPLCDLLLEMLDA | PLCDLLLEML (A02.01) | |
| | | HRLHAPTSRGGASVE | VPLCDLLLEM (B07.02) | |
| | | ETDQSHLATAGSTSSH | VVPLCDLLL (A02.01, | |
| | | SLQKYYITGE | A24.02) | |
| ESR1 | Y537N | IHLMAKAGLTLQQQH | NVVPLNDLL (A02.01) | Breast Cancer |
| | | QRLAQLLLILSHIRHM | NVVPLNDLLL (A02.01) | |
| | | SNKGMEHLYSMKCK | PLNDLLLEM (A02.01) | |
| | | NVVPLNDLLLEMLDA | PLNDLLLEML (A02.01) | |
| | | HRLHAPTSRGGASVE | VPLNDLLLEM (B07.02) | |
| | | ETDQSHLATAGSTSSH | | |
| | | SLQKYYITGE | | |
| ESR1 | Y537S | IHLMAKAGLTLQQQH | NVVPLSDLL (A02.01) | Breast Cancer |
| | | QRLAQLLLILSHIRHM | NVVPLSDLLL (A02.01) | |
| | | SNKGMEHLYSMKCK | PLSDLLLEM (A02.01) | |
| | | NVVPLSDLLLEMLDA | PLSDLLLEML (A02.01) | |
| | | HRLHAPTSRGGASVE | VPLSDLLLEM (B07.02) | |
| | | ETDQSHLATAGSTSSH | VVPLSDLLL (A02.01, | |
| | | SLQKYYITGE | A24.02) | |
| FGFR3 | S249C | HRIGGIKLRHQQWSL | VLERCPHRPI (A02.01, | BLCA, HNSC, KIRP, |
| | | VMESVVPSDRGNYTC | B08.01) | LUSC |
| | | VVENKFGSIRQTYTLD | YTLDVLERC (A02.01) | |
| | | VLERCPHRPILQAGLP | | |
| | | ANQTAVLGSDVEFHC | | |
| | | KVYSDAQPHIQWLKH | | |
| | | VEVNGSKVG | | |
| FRG1B | L52S | AVKLSDSRIALKSGYG | FQNGKMALS (A02.01) | GBM, KIRP, PRAD, |
| | | KYLGINSDELVGHSD | | SKCM |
| | | AIGPREQWEPVFQNG | | |
| | | KMALSASNSCFIRCNE | | |
| | | AGDIEAKSKTAGEEE | | |
| | | MIKIRSCAEKETKKKD | | |
| | | DIPEEDKG | | |
| HER2 | V777L | GSGAFGTVYKGIWIPD | VMAGLGSPYV | BRCA |
| | (Resistance) | GENVKIPVAIKVLREN | (A02.01, A03.01) | |
| | | TSPKANKEILDEAYV | | |
| | | MAGLGSPYVSRLLGIC | | |
| | | LTSTVQLVTQLMPYG | | |
| | | CLLDHVRENRGRLGS | | |
| | | QDLLNWCM | | |
| IDH1 | R132H | RVEEFKLKQMWKSPN | KPIIIGHHA (B07.02) | BLCA, GBM, PRAD |
| | | GTIRNILGGTVFREAII | | |
| | | CKNIPRLVSGWVKPIII | | |
| | | GHHAYGDQYRATDF | | |
| | | VVPGPGKVEITYTPSD | | |
| | | GTQKVTYLVHNFEEG | | |
| | | GGVAMGM | | |
| IDH1 | R132C | RVEEFKLKQMWKSPN | KPIIIGCHA (B07.02) | BLCA, GBM, PRAD |
| | | GTIRNILGGTVFREAII | | |
| | | CKNIPRLVSGWVKPIII | | |
| | | GCHAYGDQYRATDFV | | |
| | | VPGPGKVEITYTPSDG | | |
| | | TQKVTYLVHNFEEGG | | |
| | | GVAMGM | | |
| IDH1 | R132G | RVEEFKLKQMWKSPN | KPIIIGGHA (B07.02) | BLCA, BRCA, CRC, |
| | | GTIRNILGGTVFREAII | | GBM, HNSC, LUAD, |
| | | CKNIPRLVSGWVKPIII | | PAAD, PRAD, UCEC |
| | | GGHAYGDQYRATDF | | |
| | | VVPGPGKVEITYTPSD | | |
| | | GTQKVTYLVHNFEEG | | |
| | | GGVAMGM | | |
| IDH1 | R132S | RVEEFKLKQMWKSPN | KPIIIGSHA (B07.02) | BLCA, BRCA, GBM, |
| | | GTIRNILGGTVFREAII | | HNSC, LIHC, LUAD, |
| | | CKNIPRLVSGWVKPIII | | LUSC, PAAD, |
| | | GSHAYGDQYRATDFV | | SKCM, UCEC |
| | | VPGPGKVEITYTPSDG | | |
| | | TQKVTYLVHNFEEGG | | |
| | | GVAMGM | | |
| KIT | T670I | VAVKMLKPSAHLTER | IIEYCCYGDL (A02.01) | Gastrointestinal |
| | | EALMSELKVLSYLGN | TIGGPTLVII (A02.01) | stromal tumors (GIST) |
| | | HMNIVNLLGACTIGGP | VIIEYCCYG (A02.01) | |
| | | TLVIIEYCCYGDLLNF | | |
| | | LRRKRDSFICSKQEDH | | |
| | | AEAALYKNLLHSKES | | |
| | | SCSDSTNE | | |
| KIT | V654A | VEATAYGLIKSDAAM | HMNIANLLGA | Gastrointestinal |
| | | TVAVKMLKPSAHLTE | (A02.01) | stromal tumors (GIST) |
| | | REALMSELKVLSYLG | IANLLGACTI (A02.01) | |
| | | NHMNIANLLGACTIG | MNIANLLGA (A02.01) | |
| | | GPTLVITEYCCYGDLL | YLGNHMNIA (A02.01, | |
| | | NFLRRKRDSFICSKQE | B08.01) | |
| | | DHAEAALYK | YLGNHMNIAN | |
| | | | (A02.01) | |
| MEK | C121S | ISELGAGNGGVVFKVS | VLHESNSPY (A03.01) | Melanoma |
| | | HKPSGLVMARKLIHL | VLHESNSPYI (A02.01) | |
| | | EIKPAIRNQIIRELQVL | | |
| | | HESNSPYIVGFYGAFY | | |
| | | SDGEISICMEHMDGGS | | |
| | | LDQVLKKAGRIPEQIL | | |
| | | GKVSI | | |
| MEK | P124L | LGAGNGGVVFKVSHK | LQVLHECNSL (A02.01, | Melanoma |
| | | PSGLVMARKLIHLEIK | B08.01) | |
| | | PAIRNQIIRELQVLHEC | LYIVGFYGAF (A24.02) | |
| | | NSLYIVGFYGAFYSDG | NSLYIVGFY (A01.01) | |
| | | EISICMEHMDGGSLDQ | QVLHECNSL (A02.01, | |
| | | VLKKAGRIPEQILGKV | B08.01) | |
| | | SIAVI | SLYIVGFYG (A02.01) | |
| | | | SLYIVGFYGA (A02.01) | |
| | | | VLHECNSLY (A03.01) | |
| | | | VLHECNSLYI (A02.01, | |
| | | | A03.01) | |
| MYC | E39D | MPLNVSFTNRNYDLD | FYQQQQQSDL | Lymphoid Cancer; |
| | | YDSVQPYFYCDEEEN | (A24.02) | Burkitt Lymphoma |
| | | FYQQQQQSDLQPPAPS | QQQSDLQPPA | |
| | | EDIWKKFELLPTPPLSP | (A02. 01) | |
| | | SRRSGLCSPSYVAVTP | QQSDLQPPA (A02.01) | |
| | | FSLRGDNDGG | YQQQQQSDL (A02.01, | |
| | | | B08.01) | |
| MYC | P57S | FTNRNYDLDYDSVQP | FELLSTPPL (A02.01, | Lymphoid Cancer |
| | | YFYCDEEENFYQQQQ | B08.01) | |
| | | QSELQPPAPSEDIWKK | LLSTPPLSPS (A02.01) | |
| | | FELLSTPPLSPSRRSGL | | |
| | | CSPSYVAVTPFSLRGD | | |
| | | NDGGGGSFSTADQLE | | |
| | | MVTELLG | | |
| MYC | T58I | TNRNYDLDYDSVQPY | FELLPIPPL (A02.01) | Neuroblastoma |
| | | FYCDEEENFYQQQQQ | IWKKFELLPI (A24.02) | |
| | | SELQPPAPSEDIWKKF | LLPIPPLSPS (A02.01, | |
| | | ELLPIPPLSPSRRSGLC | B07.02) | |
| | | SPSYVAVTPFSLRGDN | LPIPPLSPS (B07.02) | |
| | | DGGGGSFSTADQLEM | | |
| | | VTELLGG | | |
| PDGFRa | T674I | VAVKMLKPTARSSEK | IIEYCFYGDL (A02.01) | Chronic Eosinophilic |
| | | QALMSELKIMTHLGP | IIIEYCFYG (A02.01) | Leukemia |
| | | HLNIVNLLGACTKSGP | IYIIIEYCF (A24.02) | |
| | | IYIIIEYCFYGDLVNYL | IYIIIEYCFY (A24.02) | |
| | | HKNRDSFLSHHPEKPK | YIIIEYCFYG (A02.01) | |
| | | KELDIFGLNPADESTR | | |
| | | SYVILS | | |
| PIK3CA | E542K | IEEHANWSVSREAGFS | KITEQEKDFL (A02.01) | BLCA, BRCA, CESC, |
| | | YSHAGLSNRLARDNE | | CRC, GBM, HNSC, |
| | | LRENDKEQLKAISTRD | | KIRC, KIRP, LIHC, |
| | | PLSKITEQEKDFLWSH | | LUAD, LUSC, PRAD, |
| | | RHYCVTIPEILPKLLLS | | UCEC |
| | | VKWNSRDEVAQMYC | | |
| | | LVKDWPP | | |
| PIK3CA | E545K | HANWSVSREAGFSYS | STRDPLSEITK (A03.01) | BLCA, BRCA, CESC, |
| | | HAGLSNRLARDNELR | DPLSEITK (A03.01) | CRC, GBM, HNSC, |
| | | ENDKEQLKAISTRDPL | | KIRC, KIRP, LIHC, |
| | | SEITKQEKDFLWSHRH | | LUAD, LUSC, PRAD, |
| | | YCVTIPEILPKLLLSVK | | SKCM, UCEC |
| | | WNSRDEVAQMYCLV | | |
| | | KDWPPIKP | | |
| PIK3CA | H1047R | LFINLFSMMLGSGMPE | | BRCA, CESC, CRC, |
| | | LQSFDDIAYIRKTLAL | | GBM, HNSC, LIHC, |
| | | DKTEQEALEYFMKQM | | LUAD, LUSC, PRAD, |
| | | NDARHGGWTTKMDW | | UCEC |
| | | IFHTIKQHALN | | |
| POLE | P286R | QRGGVITDEEETSKKI | LPLKFRDAET (B07.02) | Colorectal |
| | | ADQLDNIVDMREYDV | | adenocarcinoma; |
| | | PYHIRLSIDIETTKLPL | | Uterine/Endometrium |
| | | KFRDAETDQIMMISY | | Adenocarcinoma; |
| | | MIDGQGYLITNREIVS | | Colorectal |
| | | EDIEDFEFTPKPEYEGP | | adenocarcinoma, |
| | | FCVFN | | MSI+; |
| | | | | Uterine/Endometrium |
| | | | | Adenocarcinoma, |
| | | | | MSI+; Endometrioid |
| | | | | carcinoma; |
| | | | | Endometrium Serous |
| | | | | carcinoma; |
| | | | | Endometrium |
| | | | | Carcinosarcoma- |
| | | | | malignant mesodermal |
| | | | | mixed tumor; Glioma; |
| | | | | Astrocytoma; GBM |
| PTEN | R130Q | KFNCRVAQYPFEDHN | QTGVMICAYL | BRCA, CESC, CRC, |
| | | PPQLELIKPFCEDLDQ | (A02.01) | GBM, KIRC, LUSC, |
| | | WLSEDDNHVAAIHCK | | UCEC |
| | | AGKGQTGVMICAYLL | | |
| | | HRGKFLKAQEALDFY | | |
| | | GEVRTRDKKGVTIPSQ | | |
| | | RRYVYYYSY | | |
| RAC1 | P29S | MQAIKCVVVGDGAV | AFSGEYIPTV (A02.01, | Melanoma |
| | | GKTCLLISYTTNAFSG | A24.02) | |
| | | EYIPTVFDNYSANVM | | |
| | | VDGKPVNLGLWDTA | | |
| | | GQEDYDRLRPLSYPQ | | |
| | | TVGET | | |
| TP53 | G245S | IRVEGNLRVEYLDDR | SMNRRPILT (A02.01, | BLCA, BRCA, CRC, |
| | | NTFRHSVVVPYEPPEV | B08.01) | GBM, HNSC, LUSC, |
| | | GSDCTTIHYNYMCNS | YMCNSSCMGS | PAAD, PRAD |
| | | SCMGSMNRRPILTIITL | (A02.01) | |
| | | EDSSGNLLGRNSFEVR | | |
| | | VCACPGRDRRTEEEN | | |
| | | LRKKGEP | | |
| TP53 | R175H | TYSPALNKMFCQLAK | | BLCA, BRCA, CRC, |
| | | TCPVQLWVDSTPPPGT | | GBM, HNSC, LUAD, |
| | | RVRAMAIYKQSQHMT | | PAAD, PRAD, UCEC |
| | | EVVRHCPHHERCSDS | | |
| | | DGLAPPQHLIRVEGNL | | |
| | | RVEYLDDRNTFRHSV | | |
| | | VVPYEPPEV | | |
| TP53 | R248Q | EGNLRVEYLDDRNTF | GMNQRPILT (A02.01) | BLCA, BRCA, CRC, |
| | | RHSVVVPYEPPEVGSD | | GBM, HNSC, KIRC, |
| | | CTTIHYNYMCNSSCM | | LIHC, LUSC, PAAD, |
| | | GGMNQRPILTIITLEDS | | PRAD, UCEC |
| | | SGNLLGRNSFEVRVC | | |
| | | ACPGRDRRTEEENLR | | |
| | | KKGEPHHE | | |
| TP53 | R248W | EGNLRVEYLDDRNTF | GMNWRPILT (A02.01) | BLCA, BRCA, CRC, |
| | | RHSVVVPYEPPEVGSD | | GBM, HNSC, LIHC, |
| | | CTTIHYNYMCNSSCM | | LUSC, PAAD, |
| | | GGMNWRPILTIITLED | | SKCM, UCEC |
| | | SSGNLLGRNSFEVRVC | | |
| | | ACPGRDRRTEEENLR | | |
| | | KKGEPHHE | | |
| TP53 | R273C | PEVGSDCTTIHYNYM | LLGRNSFEVC (A02.01) | BLCA, BRCA, CRC, |
| | | CNSSCMGGMNRRPIL | | GBM, HNSC, LUSC, |
| | | TIITLEDSSGNLLGRNS | | PAAD, UCEC |
| | | FEVCVCACPGRDRRT | | |
| | | EEENLRKKGEPHHELP | | |
| | | PGSTKRALPNNTSSSP | | |
| | | QPKKKPL | | |

TABLE 35B

| | | MSI-ASSOCIATED | | |
|---|---|---|---|---|
| | | FRAMESHIFTS ¹ | | |
| ACVR2A | D96fs; +1 | GVEPCYGDKDKRRHC | | MSI+ CRC, MSI+ |
| | | FATWKNISGSIEIVKQ | | Uterine/Endometrium |
| | | GCWLDDINCYDRTDC | | Cancer, MSI+ |
| | | VEKKRQP* | | Stomach Cancer, |
| | | | | Lynch syndrome |
| ACVR2A | D96fs; −1 | GVEPCYGDKDKRRHC | ALKYIFVAV (A02.01, | MSI+ CRC, MSI+ |
| | | FATWKNISGSIEIVKQ | B08.01) | Uterine/Endometrium |
| | | GCWLDDINCYDRTDC | ALKYIFVAVR (A03.01) | Cancer, MSI+ |
| | | VEKKTALKYIFVAVR | AVRAICVMK (A03.01) | Stomach Cancer, |
| | | AICVMKSFLIFRRWKS | AVRAICVMKS | Lynch syndrome |
| | | HSPLQIQLHLSHPITTS | (A03.01) | |
| | | CSIPWCHLC* | CVEKKTALK (A03.01) | |
| | | | CVEKKTALKY | |
| | | | (A01.01) | |
| | | | CVMKSFLIF (A24.02, | |
| | | | B08.01) | |
| | | | CVMKSFLIFR (A03.01) | |
| | | | FLIFRRWKS (A02.01, | |
| | | | B08.01) | |
| | | | FRRWKSHSPL (B08.01) | |
| | | | FVAVRAICV (A02.01, | |
| | | | B08.01) | |
| | | | FVAVRAICVM | |
| | | | (B08.01) | |
| | | | IQLHLSHPI (A02.01) | |
| | | | KSFLIFRRWK (A03.01) | |
| | | | KTALKYIFV (A02.01) | |
| | | | KYIFVAVRAI (A24.02) | |
| | | | RWKSHSPLQI (A24.02) | |
| | | | TALKYIFVAV (A02.01, | |
| | | | B08.01) | |
| | | | VAVRAICVMK | |
| | | | (A03.01) | |
| | | | VMKSFLIFR (A03.01) | |
| | | | VMKSFLIFRR (A03.01) | |
| | | | YIFVAVRAI (A02.01) | |
| C15ORF40 | L132fs; +1 | TAEAVNVAIAAPPSEG | ALFFFFFET (A02.01) | MSI+ CRC, MSI+ |
| | | EANAELCRYLSKVLE | ALFFFFFETK (A03.01) | Uterine/Endometrium |
| | | LRKSDVVLDKVGLAL | AQAGVQWRSL | Cancer, MSI+ |
| | | FFFFFETKSCSVAQAG | (A02.01) | Stomach Cancer, |
| | | VQWRSLGSLQPPPPGF | CLANFCIFNR (A03.01) | Lynch syndrome |
| | | KLFSCLSFLSSWDYRR | CLSFLSSWDY (A01.01, | |
| | | MPPCLANFCIFNRDGV | A03.01) | |
| | | SPCWSGWS* | FFETKSCSV (B08.01) | |
| | | | FFFETKSCSV (A02.01) | |
| | | | FKLFSCLSFL (A02.01) | |
| | | | FLSSWDYRRM | |
| | | | (A02.01) | |
| | | | GFKLFSCLSF (A24.02) | |
| | | | KLFSCLSFL (A02.01, | |
| | | | A03.01) | |
| | | | KLFSCLSFLS (A02.01, | |
| | | | A03.01) | |
| | | | LALFFFFFET (A02.01) | |
| | | | LFFFFFETK (A03.01) | |
| | | | LSFLSSWDY (A01.01) | |
| | | | LSFLSSWDYR (A03.01) | |
| | | | RMPPCLANF (A24.02) | |
| | | | RRMPPCLANF | |
| | | | (A24.02) | |
| | | | SLQPPPPGFK (A03.01) | |
| | | | VQWRSLGSL (A02.01) | |
| CNOT1 | L1544fs; +1 | LSVIIFFFVYIWHWAL | FFFSVIFST (A02.01) | MSI+ CRC, MSI+ |
| | | PLILNNHHICLMSSIIL | MSVCFFFFSV (A02.01) | Uterine/Endometrium |
| | | DCNSVRQSIMSVCFFF | SVCFFFFSV (A02.01, | Cancer, MSI+ |
| | | FSVIFSTRCLTDSRYPN | B08.01) | Stomach Cancer, |
| | | ICWFK* | SVCFFFFSVI (A02.01) | Lynch syndrome |
| CNOT1 | L1544fs; −1 | LSVIIFFFVYIWHWAL | FFCYILNTMF (A24.02) | MSI+ CRC, MSI+ |
| | | PLILNNHHICLMSSIIL | MSVCFFFFCY (A01.01) | Uterine/Endometrium |
| | | DCNSVRQSIMSVCFFF | SVCFFFFCYI (A02.01) | Cancer, MSI+ |
| | | FCYILNTMFDR* | | Stomach Cancer, |
| | | | | Lynch syndrome |
| EIF2B3 | A151fs; −1 | VLVLSCDLITDVALHE | KQWSSVTSL (A02.01) | MSI+ CRC, MSI+ |
| | | VVDLFRAYDASLAML | VLWMPTSTV (A02.01) | Uterine/Endometrium |
| | | MRKGQDSIEPVPGQK | | Cancer, MSI+ |
| | | GKKKQWSSVTSLEWT | | Stomach Cancer, |
| | | AQERGCSSWLMKQT | | Lynch syndrome |
| | | WMKSWSLRDPSYRSI | | |
| | | LEYVSTRVLWMPTST | | |
| | | V* | | |
| EPHB2 | K1020fs; −1 | SIQVMRAQMNQIQSV | ILIRKAMTV | MSI+ CRC, MSI+ |
| | | EGQPLARRPRATGRT | (A02.01) | Uterine/Endometrium |
| | | KRCQPRDVTKKTCNS | | Cancer, MSI+ |
| | | NDGKKREWEKRKQIL | | Stomach Cancer, |
| | | GGGGKYKEYFLKRILI | | Lynch syndrome |
| | | RKAMTVLAGDKKGL | | |
| | | GRFMRCVQSETKAVS | | |
| | | LQLPLGR* | | |
| ESRP1 | N512fs; +1 | LDFLGEFATDIRTHGV | | MSI+ CRC, MSI+ |
| | | HMVLNHQGRPSGDAF | | Uterine/Endometrium |
| | | IQMKSADRAFMAAQK | | Cancer, MSI+ |
| | | CHKKKHEGQIC* | | Stomach Cancer, |
| | | | | Lynch syndrome |
| ESRP1 | N512fs; −1 | LDFLGEFATDIRTHGV | | MSI+ CRC, MSI+ |
| | | HMVLNHQGRPSGDAF | | Uterine/Endometrium |
| | | IQMKSADRAFMAAQK | | Cancer, MSI+ |
| | | CHKKT* | | Stomach Cancer, |
| | | | | Lynch syndrome |
| FAM111 | A273fs; −1 | GALCKDGRFRSDIGEF | RMKVPLMK (A03.01) | MSI+ CRC, MSI+ |
| B | | EWKLKEGHKKIYGKQ | | Uterine/Endometrium |
| | | SMVDEVSGKVLEMDI | | Cancer, MSI+ |
| | | SKKKHYNRKISIKKLN | | Stomach Cancer, |
| | | RMKVPLMKLITRV* | | Lynch syndrome |
| GBP3 | T585fs; −1 | RERAQLLEEQEKTLTS | TLKKKPRDI | MSI+ CRC, MSI+ |
| | | KLQEQARVLKERCQG | (B08.01) | Uterine/Endometrium |
| | | ESTQLQNEIQKLQKTL | | Cancer, MSI+ |
| | | KKKPRDICRIS* | | Stomach Cancer, |
| | | | | Lynch syndrome |
| JAK1 | P861fs; +1 | VNTLKEGKRLPCPPNC | LIEGFEALLK (A03.01) | MSI+ CRC, MSI+ |
| | | PDEVYQLMRKCWEFQ | | Uterine/Endometrium |
| | | PSNRTSFQNLIEGFEAL | | Cancer, MSI+ |
| | | LKTSN* | | Stomach Cancer, |
| | | | | Lynch syndrome |
| JAK1 | K860fs; −1 | CRPVTPSCKELADLM | QQLKWTPHI (A02.01) | MSI+ CRC MSI+ |
| | | TRCMNYDPNQRPFFR | QLKWTPHILK (A03.01) | Uterine/Endometnum |
| | | AIMRDINKLEEQNPDI | IVSEKNQQLK (A03.01) | Cancer, MSI+ |
| | | VSEKNQQLKWTPHIL | QLKWTPHILK (A03.01) | Stomach Cancer, |
| | | KSAS* | QQLKWTPHI (A24.02) | Lynch syndrome |
| | | | NQQLKWTPHIL | |
| | | | (B08.01) | |
| | | | NQQLKWTPHI (B08.01) | |
| | | | QLKWTPHIL (B08.01) | |
| LMAN1 | E305fs; +1 | DDHDVLSFLTFQLTEP | GPPRPPRAAC (B07.02) | MSI+ CRC, MSI+ |
| | | GKEPPTPDKEISEKEK | PPRPPRAAC (B07.02) | Uterine/Endometrium |
| | | EKYQEEFEHFQQELD | | Cancer, MSI+ |
| | | KKKRGIPEGPPRPPRA | | Stomach Cancer, |
| | | ACGGNI* | | Lynch syndrome |
| LMAN1 | E305fs; −1 | DDHDVLSFLTFQLTEP | SLRRKYLRV (B08.01) | MSI+ CRC, MSI+ |
| | | GKEPPTPDKEISEKEK | | Uterine/Endometrium |
| | | EKYQEEFEHFQQELD | | Cancer, MSI+ |
| | | KKKRNSRRATPTSKG | | Stomach Cancer, |
| | | SLRRKYLRV* | | Lynch syndrome |
| MSH3 | N385fs; +1 | TKSTLIGEDVNPLIKL | SAACHRRGCV | MSI+ CRC, MSI+ |
| | | DDAVNVDEIMTDTST | (B08.01) | Uterine/Endometrium |
| | | SYLLCISENKENVRDK | | Cancer, MSI+ |
| | | KKGQHFYWHCGSAA | | Stomach Cancer, |
| | | CHRRGCV* | | Lynch syndrome |
| MSH3 | K383fs; −1 | LYTKSTLIGEDVNPLI | ALWECSLPQA | MSI+ CRC, MSI+ |
| | | KLDDAVNVDEIMTDT | (A02.01) | Uterine/Endometrium |
| | | STSYLLCISENKENVR | CLIVSRTLL (B08.01) | Cancer, MSI+ |
| | | DKKRATFLLALWECS | CLIVSRTLLL (A02.01, | Stomach Cancer, |
| | | LPQARLCLIVSRTLLL | B08.01) | Lynch syndrome |
| | | VQS* | FLLALWECS (A02.01) | |
| | | | FLLALWECSL (A02.01, | |
| | | | B08.01) | |
| | | | IVSRTLLLV (A02.01) | |
| | | | LIVSRTLLL (A02.01, | |
| | | | B08.01) | |
| | | | LIVSRTLLLV (A02.01) | |
| | | | LLALWECSL (A02.01, | |
| | | | B08.01) | |
| | | | LPQARLCLI (B08.01, | |
| | | | B07.02) | |
| | | | LPQARLCLIV (B08.01) | |
| | | | NVRDKKRATF | |
| | | | (B08.01) | |
| | | | SLPQARLCLI (A02.01, | |
| | | | B08.01) | |
| NDUFC2 | A70fs; +1 | LPPPKLTDPRLLYIGFL | FFCWILSCK (A03.01) | MSI+ CRC, MSI+ |
| | | GYCSGLIDNLIRRRPIA | FFFCWILSCK (A03.01) | Uterine/Endometrium |
| | | TAGLHRQLLYITAFFF | ITAFFFCWI (A02.01) | Cancer, MSI+ |
| | | CWILSCKT* | LYITAFFFCW (A24.02) | Stomach Cancer, |
| | | | YITAFFFCWI (A02.01) | Lynch syndrome |
| NDUFC2 | F69fs; −1 | SLPPPKLTDPRLLYIGF | ITAFFLLDI (A02.01) | MSI+ CRC, MSI+ |
| | | LGYCSGLIDNLIRRRPI | LLYITAFFL (A02.01, | Uterine/Endometrium |
| | | ATAGLHRQLLYITAFF | B08.01) | Cancer, MSI+ |
| | | LLDIIL* | LLYITAFFLL (A02.01, | Stomach Cancer, |
| | | | A24. 02) | Lynch syndrome |
| | | | LYITAFFLL (A24.02) | |
| | | | LYITAFFLLD (A24.02) | |
| | | | YITAFFLLDI (A02.01) | |
| RBM27 | Q817; +1 | NQSGGAGEDCQIFSTP | GSNEVTTRY (A01.01) | MSI+ CRC, MSI+ |
| | | GHPKMIYSSSNLKTPS | MPKDVNIQV (B07.02) | Uterine/Endometrium |
| | | KLCSGSKSHDVQEVL | TGSNEVTTRY (A01.01) | Cancer, MSI+ |
| | | KKKTGSNEVTTRYEE | | Stomach Cancer, |
| | | KKTGSVRKANRMPKD | | Lynch syndrome |
| | | VNIQVRKKQKHETRR | | |
| | | KSKYNEDFERAWRED | | |
| | | LTIKR* | | |
| RPL22 | K16fs; +1 | MAPVKKLVVKGGKK | | MSI+ CRC, MSI+ |
| | | KEASSEVHS* | | Uterine/Endometrium |
| | | | | Cancer, MSI+ |
| | | | | Stomach Cancer, |
| | | | | Lynch syndrome |
| RPL22 | K15fs; −1 | MAPVKKLVVKGGKK | | MSI+ CRC, MSI+ |
| | | RSKF* | | Uterine/Endometrium |
| | | | | Cancer, MSI+ |
| | | | | Stomach Cancer, |
| | | | | Lynch syndrome |
| SEC31A | I462fs; +1 | MPSHQGAEQQQQQH | | MSI+ CRC, MSI+ |
| | | HVFISQVVTEKEFLSR | | Uterine/Endometrium |
| | | SDQLQQAVQSQGFIN | | Cancer, MSI+ |
| | | YCQKKN* | | Stomach Cancer, |
| | | | | Lynch syndrome |
| SEC31A | I462fs; −1 | MPSHQGAEQQQQQH | KKLMLLRLNL | MSI+ CRC, MSI+ |
| | | HVFISQVVTEKEFLSR | (A02.01) | Uterine/Endometrium |
| | | SDQLQQAVQSQGFIN | KLMLLRLNL (A02.01, | Cancer, MSI+ |
| | | YCQKKLMLLRLNLRK | A03.01, B07.02, B08.01) | Stomach Cancer, |
| | | MCGPF* | KLMLLRLNLR | Lynch syndrome |
| | | | (A03.01) | |
| | | | LLRLNLRKM (B08.01) | |
| | | | LMLLRLNL (B08.01) | |
| | | | LMLLRLNLRK | |
| | | | (A03.01) | |
| | | | LNLRKMCGPF | |
| | | | (B08.01) | |
| | | | MLLRLNLRK (A03.01) | |
| | | | MLLRLNLRKM | |
| | | | (A02.01, A03.01, | |
| | | | B08.01) | |
| | | | NLRKMCGPF (B08.01) | |
| | | | NYCQKKLMLL | |
| | | | (A24.02) | |
| | | | YCQKKLMLL (B08.01) | |
| SEC63 | K530fs; +1 | AEVFEKEQSICAAEEQ | FKKKTYTCAI (B08.01) | MSI+ CRC, MSI+ |
| | | PAEDGQGETNKNRTK | ITTVKATETK (A03.01) | Uterine/Endometrium |
| | | GGWQQKSKGPKKTA | KSKKKETFK (A03.01) | Cancer, MSI+ |
| | | KSKKKETFKKKTYTC | KSKKKETFKK | Stomach Cancer, |
| | | AITTVKATETKAGKW | (A03.01) | Lynch syndrome |
| | | SRWE* | KTYTCAITTV (A02.01, | |
| | | | A24.02) | |
| | | | TFKKKTYTC (B08.01) | |
| | | | TYTCAITTV (A24.02) | |
| | | | TYTCAITTVK (A03.01) | |
| | | | YTCAITTVK (A03.01) | |
| SEC63 | K529fs; −1 | MAEVFEKEQSICAAEE | TAKSKKRNL (B08.01) | MSI+ CRC, MSI+ |
| | | QPAEDGQGETNKNRT | | Uterine/Endometrium |
| | | KGGWQQKSKGPKKT | | Cancer, MSI+ |
| | | AKSKKRNL* | | Stomach Cancer, |
| | | | | Lynch syndrome |
| SLC35F5 | C248fs; −1 | NIMEIRQLPSSHALEA | FALCGFWQI (A02.01) | MSI+ CRC, MSI+ |
| | | KLSRMSYPVKEQESIL | | Uterine/Endometrium |
| | | KTVGKLTATQVAKISF | | Cancer, MSI+ |
| | | FFALCGFWQICHIKKH | | Stomach Cancer, |
| | | FQTHKLL* | | Lynch syndrome |
| SMAP1 | K172fs; +1 | YEKKKYYDKNAIAIT | | MSI+ CRC, MSI+ |
| | | NISSSDAPLQPLVSSPS | | Uterine/Endometrium |
| | | LQAAVDKNKLEKEKE | | Cancer, MSI+ |
| | | KKKGREKERKGARKA | | Stomach Cancer, |
| | | GKTTYS* | | Lynch syndrome |
| SMAP1 | K171fs; −1 | KYEKKKYYDKNAIAI | LKKLRSPL (B08.01) | MSI+ CRC, MSI+ |
| | | TNISSSDAPLQPLVSSP | SLKKVPAL (B08.01) | Uterine/Endometrium |
| | | SLQAAVDKNKLEKEK | RKISNWSLKK (A03.01) | Cancer, MSI+ |
| | | EKKRKRKREKRSQKS | VPALKKLRSPL | Stomach Cancer, |
| | | RQNHLQLKSCRRKISN | (B07.02) | Lynch syndrome |
| | | WSLKKVPALKKLRSP | | |
| | | LWIF* | | |
| TFAM | E148fs; +1 | IYQDAYRAEWQVYKE | KRVNTAWKTK | MSI+ CRC, MSI+ |
| | | EISRFKEQLTPSQIMSL | (A03.01) | Uterine/Endometrium |
| | | EKEIMDKHLKRKAMT | MTKKKRVNTA | Cancer, MSI+ |
| | | KKKRVNTAWKTKKT | (B08.01) | Stomach Cancer, |
| | | SFSL* | RVNTAWKTK (A03.01) | Lynch syndrome |
| | | | RVNTAWKTKK | |
| | | | (A03.01) | |
| | | | TKKKRVNTA (B08.01) | |
| | | | WKTKKTSFSL (B08.01) | |
| TFAM | E148fs; −1 | IYQDAYRAEWQVYKE | | MSI+ CRC, MSI+ |
| | | EISRFKEQLTPSQIMSL | | Uterine/Endometrium |
| | | EKEIMDKHLKRKAMT | | Cancer, MSI+ |
| | | KKKS* | | Stomach Cancer, |
| | | | | Lynch syndrome |
| TGFBR2 | P129fs; +1 | KPQEVCVAVWRKND | | MSI+ CRC, MSI+ |
| | | ENITLETVCHDPKLPY | | Uterine/Endometrium |
| | | HDFILEDAASPKCIMK | | Cancer, MSI+ |
| | | EKKKAW* | | Stomach Cancer, |
| | | | | Lynch syndrome |
| TGFBR2 | K128fs: −1 | EKPQEVCVAVWRKN | ALMSAMTTS (A02.01) | MSI+ CRC, MSI+ |
| | | DENITLETVCHDPKLP | AMTTSSSQK (A03.01, | Uterine/Endometrium |
| | | YHDFILEDAASPKCIM | A11.01) | Cancer, MSI+ |
| | | KEKKSLVRLSSCVPVA | AMTTSSSQKN | Stomach Cancer, |
| | | LMSAMTTSSSQKNITP | (A03.01) | Lynch syndrome |
| | | AILTCC* | CIMKEKKSL (B08.01) | |
| | | | CIMKEKKSLV (B08.01) | |
| | | | IMKEKKSL (B08.01) | |
| | | | IMKEKKSLV (B08.01) | |
| | | | KSLVRLSSCV (A02.01) | |
| | | | LVRLSSCVPV (A02.01) | |
| | | | RLSSCVPVA (A02.01, | |
| | | | A03.01) | |
| | | | RLSSCVPVAL (A02.01) | |
| | | | SAMTTSSSQK (A03.01, | |
| | | | A11.01) | |
| | | | SLVRLSSCV (A02.01) | |
| | | | VPVALMSAM (B07.02) | |
| | | | VRLSSCVPVA (A02.01) | |
| THAP5 | K99fs; −1 | VPSKYQFLCSDHFTPD | KMRKKYAQK (A03.01) | MSI+ CRC, MSI+ |
| | | SLDIRWGIRYLKQTAV | | Uterine/Endometrium |
| | | PTIFSLPEDNQGKDPS | | Cancer, MSI+ |
| | | KKNPRRKTWKMRKK | | Stomach Cancer, |
| | | YAQKPSQKNHLY* | | Lynch syndrome |
| TTK | R854fs; −1 | GTTEEMKYVLGQLVG | FVMSDTTYK (A03.01) | MSI+ CRC, MSI+ |
| | | LNSPNSILKAAKTLYE | FVMSDTTYKI (A02.01) | Uterine/Endometrium |
| | | HYSGGESHNSSSSKTF | KTFEKKGEK (A03.01) | Cancer, MSI+ |
| | | EKKGEKNDLQLFVMS | LFVMSDTTYK | Stomach Cancer, |
| | | DTTYKIYWTVILLNPC | (A03.01) | Lynch syndrome |
| | | GNLHLKTTSL* | MSDTTYKIY (A01.01) | |
| | | | VMSDTTYKI (A02.01) | |
| | | | VMSDTTYKIY (A01.01) | |
| XPOT | F126fs; −1 | QQLIRETLISWLQAQM | YLTKWPKFFL (A02.01) | MSI+ CRC, MSI+ |
| | | LNPQPEKTFIRNKAAQ | | Uterine/Endometrium |
| | | VFALLFVTEYLTKWP | | Cancer, MSI+ |
| | | KFFLTFSQ* | | Stomach Cancer, |
| | | | | Lynch syndrome |

TABLE 35C

| | | FRAMESHIFT ¹ | | |
|---|---|---|---|---|
| APC | V1352fs | AKFQQCHSTLEPNPA | FLQERNLPP (A02.01) | CRC, LUAD, UCEC, |
| | F1354fs | DCRVLVYLQNQPGTK | FRRPHSCLA (B08.01) | STAD |
| | Q1378fs | LLNFLQERNLPPKVVL | LIVLRVVRL (B08.01) | |
| | S1398fs | RHPKVHLNTMFRRPH | LLSVHLIVL (A02.01, | |
| | | SCLADVLLSVHLIVLR | B08.01) | |
| | | VVRLPAPFRVNHAVE | | |
| | | W* | | |
| APC | S1421fs | APVIFQIALDKPCHQA | EVKHLHEILL (B08.01) | CRC, LUAD, UCEC, |
| | R1435fs | EVKHLHEILLKQLKPS | HLHEILLKQLK | STAD |
| | T1438fs | EKYLKIKHLLLKRERV | (A03.01) | |
| | P1442fs | DLSKLQ* | HLLLKRERV (B08.01) | |
| | P1443fs | | KIKHLLLKR (A03.01) | |
| | V1452fs | | KPSEKYLKI (B07.02) | |
| | P1453fs | | KYLKIKHLL (A24.02) | |
| | K1462fs | | KYLKIKHLLL (A24.02) | |
| | E1464fs | | LLKQLKPSEK (A03.01) | |
| | | | LLKRERVDL (B08.01) | |
| | | | LLLKRERVDL (B08.01) | |
| | | | QLKPSEKYLK (A03.01) | |
| | | | YLKIKHLLL (A02.01, | |
| | | | B08.01) | |
| | | | YLKIKHLLLK (A03.01) | |
| APC | T1487fs | MLQFRGSRFFQMLILY | ILPRKVLQM (B08.01) | CRC, LUAD, UCEC, |
| | H1490fs | YILPRKVLQMDFLVHP | KVLQMDFLV (A02.01, | STAD |
| | L1488fs | A* | A24.02) | |
| | | | LPRKVLQMDF | |
| | | | (B07.02, B08.01) | |
| | | | LQMDFLVHPA | |
| | | | (A02.01) | |
| | | | QMDFLVHPA (A02.01) | |
| | | | YILPRKVLQM (A02.01, | |
| | | | B08.01) | |
| ARID1A | Q1306fs | ALGPHSRISCLPTQTR | APSPASRLQC (B07.02) | STAD, UCEC, BLCA, |
| | S1316fs | GCILLAATPRSSSSSSS | HPLAPMPSKT (B07.02) | BRCA, LUSC, CESC, |
| | Y1324fs | NDMIPMAISSPPKAPL | ILPLPQLLL (A02.01) | KIRC, UCS |
| | T1348fs | LAAPSPASRLQCINSN | LLLSADQQA (A02.01) | |
| | G1351fs | SRITSGQWMAHMALL | LPTQTRGCI (B07.02) | |
| | G1378fs | PSGTKGRCTACHTAL | LPTQTRGCIL (B07.02) | |
| | P1467fs | GRGSLSSSSCPQPSPSL | RISCLPTQTR (A03.01) | |
| | | PASNKLPSLPLSKMYT | SLAETVSLH (A03.01) | |
| | | TSMAMPILPLPQLLLS | TPRSSSSSS (B07.02) | |
| | | ADQQAAPRTNFHSSL | TPRSSSSSSS (B07.02) | |
| | | AETVSLHPLAPMPSKT | | |
| | | CHHK* | | |
| ARID1A | S674fs | AHQGFPAAKESRVIQL | ALPPVLLSL (A02.01) | STAD, UCEC, BLCA, |
| | P725fs | SLLSLLIPPLTCLASEA | ALPPVLLSLA (A02.01) | BRCA, LUSC, CESC, |
| | R727fs | LPRPLLALPPVLLSLA | ALPRPLLAL (A02.01) | KIRC, UCS |
| | I736fs | QDHSRLLQCQATRCH | ASRTASCIL (B07.02) | |
| | | LGHPVASRTASCILP* | EALPRPLLAL (B08.01) | |
| | | | HLGHPVASR (A03.01) | |
| | | | HPVASRTAS (B07.02) | |
| | | | HPVASRTASC (B07.02) | |
| | | | IIQLSLLSLL (A02.01) | |
| | | | IQLSLLSLL (A02.01) | |
| | | | IQLSLLSLLI (A02.01, | |
| | | | A24.02) | |
| | | | LLALPPVLL (A02.01) | |
| | | | LLIPPLTCL (A02.01) | |
| | | | LLIPPLTCLA (A02.01) | |
| | | | LLSLLIPPL (A02.01) | |
| | | | LLSLLIPPLT (A02.01) | |
| | | | LPRPLLALPP (B07.02) | |
| | | | QLSLLSLLI (A02.01) | |
| | | | RLLQCQATR (A03.01) | |
| | | | RPLLALPPV (B07.02) | |
| | | | RPLLALPPVL (B07.02) | |
| | | | SLAQDHSRL (A02.01) | |
| | | | SLAQDHSRLL (A02.01) | |
| | | | SLLIPPLTCL (A02.01) | |
| | | | SLLSLLIPP (A02.01) | |
| | | | SLLSLLIPPL (A02.01, | |
| | | | B08.01) | |
| ARID1A | G414fs | PILAATGTSVRTAART | AAATSAASTL (B07.02) | STAD, UCEC, BLCA, |
| | Q473fs | WVPRAAIRVPDPAAV | AAIPASTSAV (B07.02) | BRCA, LUSC, CESC, |
| | H477fs | PDDHAGPGAECHGRP | AIPASTSAV (A02.01) | KIRC, UCS |
| | S499fs | LLYTADSSLWTTRPQ | ALPAGCVSSA (A02.01) | |
| | P504fs | RVWSTGPDSILQPAKS | APLLTATGSV (B07.02) | |
| | Q548fs | SPSAAAATLLPATTVP | APVLSASIL (B07.02) | |
| | P549fs | DPSCPTFVSAAATVST | ATLLPATTV (A02.01) | |
| | | TTAPVLSASILPAAIPA | ATVSTTTAPV (A02.01) | |
| | | STSAVPGSIPLPAVDD | AVPANCLFPA (A02.01) | |
| | | TAAPPEPAPLLTATGS | CLFPAALPST (A02.01) | |
| | | VSLPAAATSAASTLDA | CPTFVSAAA (B07.02) | |
| | | LPAGCVSSAPVSAVPA | FPAALPSTA (B07.02) | |
| | | NCLFPAALPSTAGAIS | FPAALPSTAG (B07.02) | |
| | | RFIWVSGILSPLNDLQ* | GAECHGRPL (B07.02) | |
| | | | GAISRFIWV (A02.01) | |
| | | | ILPAAIPAST (A02.01) | |
| | | | IWVSGILSPL (A24.02) | |
| | | | LLTATGSVSL (A02.01) | |
| | | | LLYTADSSL (A02.01) | |
| | | | LPAAATSAA (B07.02) | |
| | | | LPAAATSAAS (B07.02) | |
| | | | LPAAIPAST (B07.02) | |
| | | | LPAGCVSSA (B07.02) | |
| | | | LPAGCVSSAP (B07.02) | |
| | | | LYTADSSLW (A24.02) | |
| | | | QPAKSSPSA (B07.02) | |
| | | | QPAKSSPSAA (B07.02) | |
| | | | RFIWVSGIL (A24.02) | |
| | | | RPQRVWSTG (B07.02) | |
| | | | RVWSTGPDSI (A02.01) | |
| | | | SAVPGSIPL (B07.02) | |
| | | | SILPAAIPA (A02.01) | |
| | | | SLPAAATSA (A02.01) | |
| | | | SLPAAATSAA (A02.01) | |
| | | | SLWTTRPQR (A03.01) | |
| | | | SLWTTRPQRV | |
| | | | (A02.01) | |
| | | | SPSAAAATL (B07.02) | |
| | | | SPSAAAATLL (B07.02) | |
| | | | TLDALPAGCV | |
| | | | (A02.01) | |
| | | | TVSTTTAPV (A02.01) | |
| | | | VLSASILPA (A02.01) | |
| | | | VLSASILPAA (A02.01) | |
| | | | VPANCLFPA (B07.02) | |
| | | | VPANCLFPAA (B07.02) | |
| | | | VPDPSCPTF (B07.02) | |
| | | | VPGSIPLPA (B07.02) | |
| | | | VPGSIPLPAV (B07.02) | |
| | | | WVSGILSPL (A02.01) | |
| | | | YTADSSLWTT | |
| | | | (A02.01) | |
| | T433fs | PCRAGRRVPWAASLI | APAGMVNRA (B07.02) | STAD, UCEC, BLCA, |
| ARID1A | A441fs | HSRFLLMDNKAPAGM | ASLHRRSYL (B08.01) | BRCA, LUSC, CESC, |
| | Y447fs | VNRARLHITTSKVLTL | ASLHRRSYLK (A03.01) | KIRC, UCS |
| | P483fs | SSSSHPTPSNHRPRPL | FLLMDNKAPA | |
| | P484fs | MPNLRISSSHSLNHHS | (A02.01) | |
| | P504fs | SSPLSLHTPSSHPSLHI | HPRRSPSRL (B07.02, | |
| | S519fs | SSPRLHTPPSSRRHSST | B08.01) | |
| | H544fs | PRASPPTHSHRLSLLTS | HPSLHISSP (B07.02) | |
| | P549fs | SSNLSSQHPRRSPSRL | HRRSYLKIHL (B08.01) | |
| | P554fs | RILSPSLSSPSKLPIPSS | HSRFLLMDNK | |
| | Q563fs | ASLHRRSYLKIHLGLR | (A03.01) | |
| | | HPQPPQ* | KLPIPSSASL (A02.01) | |
| | | | KVLTLSSSSH (A03.01) | |
| | | | LIHSRFLLM (B08.01) | |
| | | | LLMDNKAPA (A02.01) | |
| | | | LMDNKAPAGM | |
| | | | (A02.01) | |
| | | | LPIPSSASL (B07.02) | |
| | | | MPNLRISSS (B07.02, | |
| | | | B08.01) | |
| | | | MPNLRISSSH (B07.02) | |
| | | | NLRISSSHSL (B07.02, | |
| | | | B08.01) | |
| | | | PPTHSHRLSL (B07.02) | |
| | | | RAGRRVPWAA | |
| | | | (B08.01) | |
| | | | RARLHITTSK (A03.01) | |
| | | | RISSSHSLNH (A03.01) | |
| | | | RLHTPPSSR (A03.01) | |
| | | | RLHTPPSSRR (A03.01) | |
| | | | RLRILSPSL (A02.01, | |
| | | | B07.02, B08.01) | |
| | | | RPLMPNLRI (B07.02) | |
| | | | RPRPLMPNL (B07.02) | |
| | | | SASLHRRSYL (B07.02, | |
| | | | B08.01) | |
| | | | SLHISSPRL (A02.01) | |
| | | | SLHRRSYLK (A03.01) | |
| | | | SLHRRSYLKI (B08.01) | |
| | | | SLIHSRFLL (A02.01) | |
| | | | SLIHSRFLLM (A02.01, | |
| | | | B08.01) | |
| | | | SLLTSSSNL (A02.01) | |
| | | | SLNI-IHSSSPL (A02.01, | |
| | | | B07.02, B08.01) | |
| | | | SLSSPSKLPI (A02.01) | |
| | | | SPLSLHTPS (B07.02) | |
| | | | SPLSLHTPSS (B07.02) | |
| | | | SPPTHSHRL (B07.02) | |
| | | | SPRLHTPPS (B07.02) | |
| | | | SPRLHTPPSS (B07.02) | |
| | | | SPSLSSPSKL (B07.02) | |
| | | | SYLKIHLGL (A24.02) | |
| | | | TPSNHRPRPL (B07.02, | |
| | | | B08.01) | |
| | | | TPSSHPSLHI (B07.02) | |
| ARID1A | A2137fs | RTNPTVRMRPHCVPF | CVPFWTGRIL (B07.02) | STAD, UCEC, BLCA, |
| | P2139fs | WTGRILLPSAASVCPIP | HCVPFWTGRIL | BRCA, LUSC, CESC, |
| | L1970fs | FEACHLCQAMTLRCP | (B07.02) | KIRC, UCS |
| | V1994fs | NTQGCCSSWAS* | ILLPSAASV (A02.01) | |
| | | | ILLPSAASVC (A02.01) | |
| | | | LLPSAASVCPI | |
| | | | (A02.01) | |
| | | | LPSAASVCPI (B07.02) | |
| | | | MRPHCVPF (B08.01) | |
| | | | RILLPSAASV (A02.01) | |
| | | | RMRPHCVPF (A24.02, | |
| | | | B07.02, B08.01) | |
| | | | RMRPHCVPFW | |
| | | | (A24.02) | |
| | | | RTNPTVRMR (A03.01) | |
| | | | SVCPIPFEA (A02.01) | |
| | | | TVRMRPHCV (B08.01) | |
| | | | TVRMRPHCVPF | |
| | | | (B08.01) | |
| | | | VPFWTGRIL (B07.02) | |
| | | | VPFWTGRILL (B07.02) | |
| | | | VRMRPHCVPF | |
| | | | (B08.01) | |
| ARID1A | N756fs | TNQALPKIEVICRGTP | AMVPRGVSM (B07.02, | STAD, UCEC, BLCA, |
| | S764fs | RCPSTVPPSPAQPYLR | B08.01) | BRCA, LUSC, CESC, |
| | T783fs | VSLPEDRYTQAWAPT | AMVPRGVSMA | KIRC, UCS |
| | Q799fs | SRTPWGAMVPRGVS | (A02.01) | |
| | A817fs | MAHKVATPGSQTIMP | AWAPTSRTPW | |
| | | CPMPTTPVQAWLEA* | (A24.02) | |
| | | | CPMPTTPVQA (B07.02) | |
| | | | CPSTVPPSPA (B07.02) | |
| | | | GAMVPRGVSM | |
| | | | (B07.02, B08.01) | |
| | | | MPCPMPTTPV (B07.02) | |
| | | | MPTTPVQAW (B07.02) | |
| | | | MPTTPVQAWL | |
| | | | (B07.02) | |
| | | | SLPEDRYTQA (A02.01) | |
| | | | SPAQPYLRV (B07.02) | |
| | | | SPAQPYLRVS (B07.02) | |
| | | | TIMPCPMPT (A02.01) | |
| | | | TPVQAWLEA (B07.02) | |
| | | | TSRTPWGAM (B07.02) | |
| | | | VPPSPAQPYL (B07.02) | |
| | | | VPRGVSMAH (B07.02) | |
| β2M | N62fs | RMERELKKWSIQTCL | CLSARTGLSI (B08.01) | CRC, STAD, SKCM, |
| | E67fs | SARTGLSISCTTLNSPP | CTTLNSPPLK (A03.01) | HNSC |
| | L74fs | LKKMSMPAV* | GLSISCTTL (A02.01) | |
| | F82fs | | SPPLKKMSM (B07.02, | |
| | T91fs | | B08.01) | |
| | E94fs | | TLNSPPLKK (A03.01) | |
| | | | TTLNSPPLK (A03.01) | |
| | | | TTLNSPPLKK (A03.01) | |
| β2M | L13fs | LCSRYSLFLAWRLSSV | LQRFRFTHV (B08.01) | CRC, STAD, SKCM, |
| | S14fs | LQRFRFTHVIQQRMES | LQRFRFTHVI (B08.01) | HNSC |
| | | QIS* | RLSSVLQRF (A24.02) | |
| | | | RLSSVLQRFR (A03.01) | |
| | | | VLQRFRFTHV (A02.01, | |
| | | | B08.01) | |
| CDH1 | A691fs | RSACVTVKGPLASVG | ASVGRHSLSK (A03.01) | ILC LumA Breast |
| | P708fs | RHSLSKQDCKFLPFW | KFLPFWGFL (A24.02) | Cancer |
| | L711fs | GFLEEFLLC* | LASVGRHSL (B07.02) | |
| | | | LPFWGFLEEF (B07.02) | |
| | | | PFWGFLEEF (A24.02) | |
| | | | SVGRHSLSK (A03.01) | |
| CDH1 | H121fs | IQWGTTTAPRPIRPPFL | APRPIRPPF (B07.02) | ILC LumA Breast |
| | P126fs | ESKQNCSHFPTPLLAS | APRPIRPPFL (B07.02) | Cancer |
| | H128fs | EDRRETGLFLPSAAQK | AQKMKKAHFL | |
| | N144fs | MKKAHFLKTWFRSNP | (B08.01) | |
| | V157fs | TKTKKARFSTASLAKE | FLPSAAQKM (A02.01) | |
| | P159fs | LTHPLLVSLLLKEKQD | GLFLPSAAQK (A03.01) | |
| | N166fs | G* | HPLLVSLLL (B07.02) | |
| | N181fs | | KAHFLKTWFR | |
| | F189fs | | (A03.01) | |
| | P201fs | | KARFSTASL (B07.02) | |
| | F205fs | | KMKKAHFLK (A03.01) | |
| | | | KTWFRSNPTK | |
| | | | (A03.01) | |
| | | | LAKELTHPL (B07.02, | |
| | | | B08.01) | |
| | | | LAKELTHPLL (B08.01) | |
| | | | NPTKTKKARF (B07.02) | |
| | | | QKMKKAHFL (B08.01) | |
| | | | RFSTASLAK (A03.01) | |
| | | | RPIRPPFLES (B07.02) | |
| | | | RSNPTKTKK (A03.01) | |
| | | | SLAKELTHPL (A02.01, | |
| | | | B08.01) | |
| | | | TKKARFSTA (B08.01) | |
| CDH1 | V114fs | PTDPFLGLRLGLHLQK | GLRFWNPSR (A03.01) | ILC LumA Breast |
| | P127fs | VFHQSHAEYSGAPPPP | ISQLLSWPQK (A03.01) | Cancer |
| | V132fs | PAPSGLRFWNPSRIAH | RIAHISQLL (A02.01) | |
| | P160fs | ISQLLSWPQKTEERLG | RLGYSSHQL (A02.01) | |
| | | YSSHQLPRK* | SQLLSWPQK (A03.01) | |
| | | | SRIAHISQL (B08.01) | |
| | | | WPQKTEERL (B07.02) | |
| | | | YSSHQLPRK (A03.01) | |
| CDH1 | L731fs | FCCSCCFFGGERWSKS | CPQRMTPGTT (B07.02) | ILC LumA Breast |
| | R749fs | PYCPQRMTPGTTFITM | EAEKRTRTL (B08.01) | Cancer |
| | E757fs | MKKEAEKRTRTLT* | GTTFITMMK (A03.01) | |
| | G759fs | | GTTFITMMKK | |
| | | | (A03.01) | |
| | | | ITMMKKEAEK | |
| | | | (A03.01) | |
| | | | RMTPGTTFI (A02.01) | |
| | | | SPYCPQRMT (B07.02) | |
| | | | TMMKKEAEK (A03.01) | |
| | | | TPGTTFITM (B07.02) | |
| | | | TPGTTFITMM (B07.02) | |
| | | | TTFITMMKK (A03.01) | |
| CDH1 | S19fs | WRRNCKAPVSLRKSV | CPGATWREA (B07.02) | ILC LumA Breast |
| | E24fs | QTPARSSPARPDRTRR | CPGATWREAA | Cancer |
| | S36fs | LPSLGVPGQPWALGA | (B07.02) | |
| | | AASRRCCCCCRSPLGS | RSRCPGATWR | |
| | | ARSRSPATLALTPRAT | (A03.01) | |
| | | RSRCPGATWREAASW | TPRATRSRC (B07.02) | |
| | | AE* | | |
| GATA3 | P394fs | PGRPLQTHVLPEPHLA | HVLPEPHLAL (B07.02) | Breast Cancer |
| | P387fs | LQPLQPHADHAHADA | RPLQTHVLPE (B07.02) | |
| | S398fs | PAIQPVLWTTPPLQHG | VLWTTPPLQH | |
| | H400fs | HRHGLEPCSMLTGPP | (A03.01) | |
| | M401fs | ARVPAVPFDLHFCRSS | | |
| | S408fs | IMKPKRDGYMFLKAE | | |
| | P409fs | SKIMFATLQRSSLWCL | | |
| | S408fs | CSNH* | | |
| | P409fs | | | |
| | T419fs | | | |
| | H424fs | | | |
| | P425fs | | | |
| | S427fs | | | |
| | F431fs | | | |
| | S430fs | | | |
| | H434fs | | | |
| | H435fs | | | |
| | S438fs | | | |
| | M443fs | | | |
| | G444fs | | | |
| | *445fs | | | |
| GATA3 | P426fs | PRPRRCTRHPACPLDH | APSESPCSPF (B07.02) | Breast Cancer |
| | H434fs | TTPPAWSPPWVRALL | CPLDHTTPPA (B07.02) | |
| | P433fs | DAHRAPSESPCSPFRL | FLQEQYHEA (A02.01, | |
| | T441fs | AFLQEQYHEA* | B08.01) | |
| | | | RLAFLQEQYH | |
| | | | (A03.01) | |
| | | | SPCSPFRLAF (B07.02) | |
| | | | SPPWVRALL (B07.02) | |
| | | | YPACPLDHTT (B07.02) | |
| MLL2 | P519fs | TRRCHCCPHLRSHP | CPALHLRSCPC (B08.01) | STAD, BLCA, CRC, |
| | E524fs | HHLRNHPRPHHLRHH | CLHHRRHLV (B08.01) | HNSC, BRCA |
| | P647fs | ACHHHLRNCPHPHFL | CLEIHRRHLVC | |
| | S654fs | RHCTCPGRWRNRPSL | (B08.01) | |
| | L656fs | RRLRSLLCLPHLNHHL | CLHRKSHPHL (B08.01) | |
| | R755fs | FLHWRSRPCLHRKSH | CLRSHACPP (B08.01) | |
| | L761fs | PHLLHLRRLYPHHLK | CLRSHTCPP (B08.01) | |
| | Q773fs | HRPCPHHLKNLLCPR | CLWCHACLH (A03.01) | |
| | | HLRNCPLPRHLKHLA | CPHHLKNHL (B07.02) | |
| | | CLHHLRSHPCPLHLKS | CPHHLKNLL (B07.02) | |
| | | HPCLHHRRHLVCSHH | CPHHLRTRL (B07.02, | |
| | | LKSLLCPLHLRSLPFP | B08.01) | |
| | | HHLRHHACPHHLRTR | CPLHLRSLPF (B07.02, | |
| | | LCPHHLKNHLCPPHLR | B08.01) | |
| | | YRAYPPCLWCHACLH | CPLPRHLKHL (B07.02, | |
| | | RLRNLPCPHRLRSLPR | B08.01) | |
| | | PLHLRLHASPHHLRTP | CPLSLRSHPC (B07.02) | |
| | | PHPHHLRTHLLPHHRR | CPRHLRNCPL (B07.02, | |
| | | TRSCPCRWRSHPCCH | B08.01) | |
| | | YLRSRNSAPGPRGRTC | FPHHLRHHA (B07.02, | |
| | | HPGLRSRTCPPGLRSH | B08.01) | |
| | | TYLRRLRSHTCPPSLR | FPFHLRHHAC (B07.02, | |
| | | SHAYALCLRSHTCPPR | B08.01) | |
| | | LRDHICPLSLRNCTCP | GLRSRTCPP (B08.01) | |
| | | PRLRSRTCLLCLRSHA | HACLHRLRNL | |
| | | CPPNLRNHTCPPSLRS | (B08.01) | |
| | | HACPPGLRNRICPLSL | HLACLHHLR (A03.01) | |
| | | RSHPCPLGLKSPLRSQ | HLCPPHLRY (A03.01) | |
| | | ANALHLRSCPCSLPLG | HLCPPHLRYR (A03.01) | |
| | | NHPYLPCLESQPCLSL | HLKHLACLH (A03.01) | |
| | | GNHLCPLCPRSCRCPH | HLKHRPCPH (B08.01) | |
| | | LGSHPCRLS* | HLKNHLCPP (B08.01) | |
| | | | HLKSHPCLH (A03.01) | |
| | | | HLKSLLCPL (A02.01, | |
| | | | B08.01) | |
| | | | HLLHLRRLY (A03.01) | |
| | | | HLRNCPLPR (A03.01) | |
| | | | HLRNCPLPRH (A03.01) | |
| | | | HLRRLYPHHL (B08.01) | |
| | | | HLRSHPCPL (B07.02, | |
| | | | B08.01) | |
| | | | HLRSHPCPLH (A03.01) | |
| | | | HLRSLPFPH (A03.01) | |
| | | | HLRTRLCPH (A03.01, | |
| | | | B08.01) | |
| | | | HLVCSHHLK (A03.01) | |
| | | | HPCLHHRRHL (B07.02, | |
| | | | B08.01) | |
| | | | HPGLRSRTC (B07.02) | |
| | | | HPHLLHLRRL (B07.02, | |
| | | | B08.01) | |
| | | | HRKSHPHLL (B08.01) | |
| | | | HRRTRSCPC (B08.01) | |
| | | | KSHPHLLHLR (A03.01) | |
| | | | KSLLCPLHLR (A03.01) | |
| | | | LLCPLHLRSL (A02.01, | |
| | | | B08.01) | |
| | | | LLHLRRLYPH (B08.01) | |
| | | | LPRHLKHLA (B07.02) | |
| | | | LPRHLKHLAC (B07.02, | |
| | | | B08.01) | |
| | | | LRRLRSHTC (B08.01) | |
| | | | LRRLYPHHL (B08.01) | |
| | | | LVCSHHLKSL (B08.01) | |
| | | | NLRNHTCPPS (B08.01) | |
| | | | PLHLRSLPF (B08.01) | |
| | | | RLCPHHLKNH | |
| | | | (A03.01) | |
| | | | RLYPHHLKH (A03.01) | |
| | | | RLYPHHLKHR | |
| | | | (A03.01) | |
| | | | RPCPHHLKNL (B07.02) | |
| | | | RSHPCPLHLK (A03.01) | |
| | | | RSLPFPHHLR (A03.01) | |
| | | | RTRLCPHHL (B07.02) | |
| | | | RTRLCPHHLK (A03.01) | |
| | | | SLLCPLHLR (A03.01) | |
| | | | SLRSHACPP (B08.01) | |
| | | | SPLRSQANA (B07.02) | |
| | | | YLRRLRSHT (B08.01) | |
| | | | YPHHLKHRPC (B07.02, | |
| | | | B08.01) | |
| PTEN | I122fs | SWKGTNWCNDMCIFI | FITSGQIFK (A03.01) | UCEC, PRAD, |
| | I135fs | TSGQIFKGTRGPRFLW | IFITSGQIF (A24.02) | SKCM, STAD, |
| | A148fs | GSKDQRQKGSNYSQS | SQSEALCVL (A02.01) | BRCA, LUSC, KIRC, |
| | L152fs | EALCVLL* | SQSEALCVLL (A02.01) | LIHC, KIRP, GBM |
| | D162fs | | | |
| | I168fs | | | |
| PTEN | L265fs | KRTKCFTFG* | | UCEC, PRAD, |
| | K266fs | | | SKCM, STAD, |
| | | | | BRCA, LUSC, KIRC, |
| | | | | LIHC, KIRP, GBM |
| PTEN | A39fs | PIFIQTLLLWDFLQKD | AYTGTILMM (A24.02) | UCEC, PRAD, |
| | E40fs | LKAYTGTILMM* | DLKAYTGTIL (B08.01) | SKCM, STAD, |
| | V45fs | | | BRCA, LUSC, KIRC, |
| | R47fs | | | LIHC, KIRP, GBM |
| | N48fs | | | |
| PTEN | T319fs | QKMILTKQIKTKPTDT | ILTKQIKTK (A03.01) | UCEC, PRAD, |
| | T321fs | FLQILR* | KMILTKQIK (A03.01) | SKCM, STAD, |
| | K327fs | | KPTDTFLQI (B07.02) | BRCA, LUSC, KIRC, |
| | A328fs | | KPTDTFLQIL (B07.02) | LIHC, KIRP, GBM |
| | A333fs | | MILTKQIKTK (A03.01) | |
| PTEN | N63fs | GFWIQSIKTITRYTIFV | ITRYTIFVLK (A03.01) | UCEC, PRAD, |
| | E73fs | LKDIMTPPNLIAELHNI | LIAELHNIL (A02.01) | SKCM, STAD, |
| | A86fs | LLKTITHHS* | LIAELHNILL (A02.01) | BRCA, LUSC, KIRC, |
| | N94fs | | MTPPNLIAEL (A02.01) | LIHC, KIRP, GBM |
| | | | NLIAELHNI (A02.01) | |
| | | | NLIAELHNIL (A02.01) | |
| | | | RYTIFVLKDI (A24.02) | |
| | | | TITRYTIFVL (A02.01) | |
| | | | TPPNLIAEL (B07.02) | |
| PTEN | T202fs | NYSNVQWRNLQSSVC | FLQFRTHTT (A02.01, | UCEC, PRAD, |
| | G209fs | GLPAKGEDIFLQFRTH | B08.01) | SKCM, STAD, |
| | C211fs | TTGRQVHVL* | LPAKGEDIFL (B07.02) | BRCA, LUSC, KIRC, |
| | I224fs | | LQFRTHTTGR (A03.01) | LIHC, KIRP, GBM |
| | G230fs | | NLQSSVCGL (A02.01) | |
| | P231fs | | SSVCGLPAK (A03.01) | |
| | R233fs | | VQWRNLQSSV | |
| | D236fs | | (A02.01) | |
| PTEN | G251fs | YQSRVLPQTEQDAKK | GQNVSLLGK (A03.01) | UCEC, PRAD, |
| | E256fs | GQNVSLLGKYILHTRT | HTRTRGNLRK | SKCM, STAD, |
| | K260fs | RGNLRKSRKWKSM* | (A03.01) | BRCA, LUSC, KIRC, |
| | Q261fs | | ILHTRTRGNL (B08.01) | LIHC, KIRP, GBM |
| | L265fs | | KGQNVSLLGK | |
| | M270fs | | (A03.01) | |
| | H272fs | | LLGKYILHT (A02.01) | |
| | T286fs | | LRKSRKWKSM | |
| | E288fs | | (B08.01) | |
| | | | SLLGKYILH (A03.01) | |
| | | | SLLGKYILHT (A02.01) | |
| TP53 | A70fs | SSQNARGCSPRGPCTS | CTSPLLAPV (A02.01) | BRCA, CRC, LUAD, |
| | P72fs | SSYTGGPCTSPLLAPVI | FPENLPGQL (B07.02) | PRAD, HNSC, LUSC, |
| | A76fs | FCPFPENLPGQLRFPS | GLLAFWDSQV | PAAD, STAD, BLCA, |
| | A79fs | GLLAFWDSQVCDLHV | (A02.01) | OV, LIHC, SKCM, |
| | P89fs | LPCPQQDVLPTGQDLP | IFCPFPENL (A24.02) | UCEC, LAML, UCS, |
| | W91fs | CAAVG* | LLAFWDSQV (A02.01) | KICH, GBM, ACC |
| | S96fs | | LLAPVIFCP (A02.01) | |
| | V97fs | | LLAPVIFCPF (A02.01, | |
| | V97fs | | A24.02) | |
| | G108fs | | LPCPQQDVL ( B07.02) | |
| | G117fs | | RFPSGLLAF ( A24.02) | |
| | S121fs | | RFPSGLLAFW (A24.02) | |
| | V122fs | | SPLLAPVIF (B07.02) | |
| | C124fs | | SPRGPCTSS (B07.02) | |
| | K139fs | | SPRGPCTSSS (B07.02) | |
| | V143fs | | SQVCDLHVL (A02.01) | |
| | | | VIFCPFPENL (A02.01) | |
| TP53 | V173fs | GAAPTMSAAQIAMV | AMVWPLLSI (A02.01) | BRCA, CRC, LUAD, |
| | H178fs | WPLLSILSEWKEICVW | AMVWPLLSIL (A02.01) | PRAD, HNSC, LUSC, |
| | D186fs | SIWMTETLFDIVWWC | AQIAMVWPL (A02.01, | PAAD, STAD, BLCA, |
| | H193fs | PMSRLRLALTVPPSTT | A24.02) | OV, LIHC, SKCM, |
| | L194fs | TTCVTVPAWAA* | AQIAMVWPLL | UCEC, LAML, UCS, |
| | E198fs | | (A02.01) | KICH, GBM, ACC |
| | V203fs | | CPMSRLRLA (B07.02, | |
| | E204fs | | B08.01) | |
| | L206fs | | CPMSRLRLAL (B07.02, | |
| | D207fs | | B08.01) | |
| | N210fs | | IAMVWPLLSI (A02.01, | |
| | T211fs | | A24.02, B08.01) | |
| | F212fs | | ILSEWKEICV (A02.01) | |
| | V225fs | | IVWWCPMSR (A03.01) | |
| | S241fs | | IVWWCPMSRL | |
| | | | (A02.01) | |
| | | | IWMTETLFDI (A24.02) | |
| | | | LLSILSEWK (A03.01) | |
| | | | MSAAQIAMV (A02.01) | |
| | | | MSRLRLALT (B08.01) | |
| | | | MSRLRLALTV (B08.01) | |
| | | | MVWPLLSIL (A02.01) | |
| | | | RLALTVPPST (A02.01) | |
| | | | TLFDIVWWC (A02.01) | |
| | | | TLFDIVWWCP | |
| | | | (A02.01) | |
| | | | TMSAAQIAMV | |
| | | | (A02.01) | |
| | | | VWSIWMTETL | |
| | | | (A24.02) | |
| | | | WMTETLFDI (A02.01, | |
| | | | A24.02) | |
| | | | WMTETLFDIV (A01.01, | |
| | | | A02.01) | |
| TP53 | R248fs | TGGPSSPSSHWKTPVV | ALRCVFVPV (A02.01, | BRCA, CRC, LUAD, |
| | P250fs | IYWDGTALRCVFVPV | B08.01) | PRAD, HNSC, LUSC, |
| | S260fs | LGETGAQRKRISARK | ALRCVFVPVL (A02.01, | PAAD, STAD, BLCA, |
| | N263fs | GSLTTSCPQGALSEHC | B08.01) | OV, LIHC, SKCM, |
| | G266fs | PTTPAPLPSQRRNHW | ALSEHCPTT (A02.01) | UCEC, LAML, UCS, |
| | N268fs | MENISPFRSVGVSASR | AQRKRISARK (A03.01) | KICH, GBM, ACC |
| | V272fs | CSES* | GAQRKRISA (B08.01) | |
| | V274fs | | HWMENISPF (A24.02) | |
| | P278fs | | LPSQRRNHW (B07.02) | |
| | D281fs | | LPSQRRNHWM | |
| | R282fs | | (B07.02, B08.01) | |
| | T284fs | | NISPFRSVGV (A02.01) | |
| | E285fs | | RISARKGSL (B07.02, | |
| | L289fs | | B08.01) | |
| | K292fs | | SPFRSVGVSA (B07.02) | |
| | P301fs | | SPSSHWKTPV (B07.02, | |
| | S303fs | | B08.01) | |
| | T312fs | | TALRCVFVPV (A02.01) | |
| | S314fs | | VIYWDGTAL (A02.01) | |
| | K319fs | | VIYWDGTALR | |
| | K320fs | | (A03.01) | |
| | P322fs | | VLGETGAQRK | |
| | Y327fs | | (A03.01) | |
| | F328fs | | | |
| | L330fs | | | |
| | R333fs | | | |
| | R335fs | | | |
| | R337fs | | | |
| | E339fs | | | |
| TP53 | S149fs | FHTPARHPRPRHGHL | HPRPRHGHL (B07.02, | BRCA, CRC, LUAD, |
| | P151fs | QAVTAHDGGCEALPP | B08.01) | PRAD, HNSC, LUSC, |
| | P152fs | P* | HPRPRHGHLQ | PAAD, STAD, BLCA, |
| | V157fs | | (B07.02) | OV, LIHC, SKCM, |
| | Q165fs | | RPRHGHLQA (B07.02) | UCEC, LAML, UCS, |
| | S166fs | | RPRHGHLQAV | KICH, GBM, ACC |
| | H168fs | | (B07.02, B08.01) | |
| | V173fs | | | |
| TP53 | P47fs | CCPRTILNNGSLKTQV | GSLKTQVQMK | BRCA, CRC, LUAD, |
| | D48fs | QMKLPECQRLLPPWP | (A03.01) | PRAD, HNSC, LUSC, |
| | D49fs | LHQQLLHRRPLHQPPP | PPGPCHLLSL (B07.02) | PAAD, STAD, BLCA, |
| | Q52fs | GPCHLLSLPRKPTRAA | RTILNNGSLK (A03.01) | OV, LIHC, SKCM, |
| | F54fs | TVSVWASCILGQPSL* | SLKTQVQMK (A03.01) | UCEC, LAML, UCS, |
| | E56fs | | SLKTQVQMKL | KICH, GBM, ACC |
| | P58fs | | (B08.01) | |
| | P60fs | | TILNNGSLK (A03.01) | |
| | E62fs | | | |
| | M66fs | | | |
| | P72fs | | | |
| | V73fs | | | |
| | P75fs | | | |
| | A78fs | | | |
| | P82fs | | | |
| | P85fs | | | |
| | S96fs | | | |
| | P98fs | | | |
| | T102fs | | | |
| | Y103fs | | | |
| | G108fs | | | |
| | F109fs | | | |
| | R110fs | | | |
| | G117fs | | | |
| TP53 | L26fs | VRKHFQTYGNYFLKT | CPPCRPKQWM | BRCA, CRC, LUAD, |
| | P27fs | TFCPPCRPKQWMI* | (B07.02) | PRAD, HNSC, LUSC, |
| | P34fs | | TTFCPPCRPIK (A03.01) | PAAD, STAD, BLCA, |
| | P36fs | | | OV, LIHC, SKCM, |
| | A39fs | | | UCEC, LAML, UCS, |
| | Q38fs | | | KICH, GBM, ACC |
| TP53 | C124fs | LARTPLPSTRCFANWP | CFANWPRPAL | BRCA, CRC, LUAD, |
| | L130fs | RPALCSCGLIPHPRPAP | (A24.02) | PRAD HNSC LUSC, |
| | N131fs | ASAPWPSTSSHST* | FANWPRPAL (B07.02, | PAAD, STAD, BLCA, |
| | C135fs | | B08.01) | OV, LIHC, SKCM, |
| | K139fs | | GLIPHPRPA (A02.01) | UCEC, LAML, UCS, |
| | A138fs | | HPRPAPASA (B07.02, | KICH, GBM, ACC |
| | T140fs | | B08.01) | |
| | V143fs | | HPRPAPASAP (B07.02) | |
| | Q144fs | | IPHPRPAPA (B07.02, | |
| | V147fs | | B08.01) | |
| | T150fs | | IPHPRPAPAS (B07.02) | |
| | P151fs | | RPALCSCGL (B07.02) | |
| | P152fs | | RPALCSCGLI (B07.02) | |
| | G154fs | | TPLPSTRCF (B07.02) | |
| | R156fs | | WPRPALCSC (B07.02) | |
| | R158fs | | WPRPALCSCG | |
| | A161fs | | (B07.02) | |
| VHL | L178fs | ELQETGHRQVALRRS | ALRRSGRPPK (A03.01) | KIRC, KIRP |
| | D179fs | GRPPKCAERPGAADT | GLVPSLVSK (A03.01) | |
| | L184fs | GAHCTSTDGRLKISVE | KISVETYTV (A02.01) | |
| | T202fs | TYTVSSQLLMVLMSL | LLMVLMSLDL | |
| | R205fs | DLDTGLVPSLVSKCLI | (A02.01, B08.01) | |
| | D213fs | LRVK* | LMSLDLDTGL | |
| | G212fs | | (A02.01) | |
| | | | LMVLMSLDL (A02.01) | |
| | | | LVSKCLILRV (A02.01) | |
| | | | QLLMVLMSL (A02.01, | |
| | | | B08.01) | |
| | | | RPGAADTGA (B07.02) | |
| | | | RPGAADTGAH | |
| | | | (B07.02) | |
| | | | SLDLDTGLV (A02.01) | |
| | | | SLVSKCLIL (A02.01, | |
| | | | B08.01) | |
| | | | SQLLMVLMSL | |
| | | | (A02.01) | |
| | | | TVSSQLLMV (A02.01) | |
| | | | TYTVSSQLL (A24.02) | |
| | | | TYTVSSQLLM (A24.02) | |
| | | | VLMSLDLDT (A02.01) | |
| | | | VPSLVSKCL (B07.02) | |
| | | | VSKCLILRVK (A03.01) | |
| | | | YTVSSQLLM (A01.01) | |
| | | | YTVSSQLLMV | |
| | | | (A02.01) | |
| VHL | L158fs | KSDASRLSGA* | | KIRC, KIRP |
| | K159fs | | | |
| | R161fs | | | |
| | Q164fs | | | |
| VHL | P146fs | RTAYFCQYHTASVYS | FCQYHTASV (B08.01) | KIRC, KIRP |
| | I147fs | ERAMPPGCPEPSQA* | | |
| | F148fs | | | |
| | L158fs | | | |
| VHL | S68fs | TRASPPRSSSAIAVRAS | CPYGSTSTA (B07.02) | KIRC, KIRP |
| | S72fs | CCPYGSTSTASRSPTQ | CPYGSTSTAS (B07.02) | |
| | I75fs | RCRLARAAASTATEV | LARAAASTAT (B07.02) | |
| | S80fs | TFGSSEMQGHTMGFW | MLTDSLFLP (A02.01) | |
| | P86fs | LTKLNYLCHLSMLTD | PPRSSSAIAV (B07.02) | |
| | P97fs | SLFLPISHCQCIL* | RAAASTATEV (B07.02) | |
| | I109fs | | SPPRSSSAI (B07.02) | |
| | H115fs | | SPPRSSSAIA (B07.02) | |
| | L116fs | | SPTQRCRLA (B07.02) | |
| | G123fs | | TQRCRLARA (B08.01) | |
| | T124fs | | TQRCRLARAA | |
| | N131fs | | (B08.01) | |
| | L135fs | | | |
| | V137fs | | | |
| | G144fs | | | |
| | D143fs | | | |
| | I147fs | | | |
| VHL | K171fs | SSLRITGDWTSSGRST | KIWKTTQMCR | KIRC, KIRP |
| | P172fs | KIWKTTQMCRKTWSG | (A03.01) | |
| | N174fs | * | WTSSGRSTK (A03.01) | |
| | L178fs | | | |
| | D179fs | | | |
| | L188fs | | | |
| VHL | V62fs | RRRRGGVGRRGVRPG | ALGELARAL (A02.01) | KIRC, KIRP |
| | V66fs | RVRPGGTGRRGGDGG | AQLRRRAAA (B08.01) | |
| | Q73fs | RAAAARAALGELARA | AQLRRRAAAL | |
| | V84fs | LPGHLLQSQSARRAA | (B08.01) | |
| | F91fs | RMAQLRRRAAALPNA | ARRAARMAQL | |
| | T100fs | AAWHGPPHPQLPRSP | (B08.01) | |
| | P103fs | LALQRCRDTRWASG* | HPQLPRSPL (B07.02, | |
| | S111fs | | B08.01) | |
| | L116fs | | HPQLPRSPLA (B07.02) | |
| | H115fs | | LARALPGHL (B07.02) | |
| | D126fs | | LARALPGHLL (B07.02) | |
| | | | MAQLRRRAA (B07.02, | |
| | | | B08.01) | |
| | | | MAQLRRRAAA | |
| | | | (B07.02, B08.01) | |
| | | | QLRRRAAAL (B07.02, | |
| | | | B08.01) | |
| | | | RAAALPNAAA | |
| | | | (B07.02) | |
| | | | RMAQLRRRAA | |
| | | | (B07.02, B08.01) | |
| | | | SQSARRAARM | |
| | | | (B08.01) | |

TABLE 35D

| | | CRYPTIC EXON ¹ | | |
|---|---|---|---|---|
| AR-v7 | cryptic final | SCKVFFKRAAEGKQK | GMTLGEKFRV | Prostate Cancer, |
| | exon | YLCASRNDCTIDKFRR | (A02:01) | Castration-resistant |
| | | KNCPSCRLRKCYEAG | RVGNCKHLK (A03.01) | Prostate Cancer |
| | | MTLGEKFRVGNCKHL | | |
| | | KMTRP* | | |

TABLE 35E

| | | OUT OF FRAME | | |
|---|---|---|---|---|
| | | FUSIONS ^{1,3} | | |
| AC01199 | AC011997.1:L | MAGAPPPASLPPCSLIS | | |
| 7.1:LRRC | RRC69 | DCCASNQRDSVGVGP | GPSEPGNNI (B07.02) | LUSC, Breast Cancer, |
| 69 | *out-of-frame | SEP:G:NNIKICNESAS | KICNESASRK (A03.01) | Head and Neck |
| | | RK* | | Cancer, LUAD |
| EEF1DP3 | EEF1DP3:FR | HGWRPFLPVRARSRW | GIQVLNVSLK (A03.01) | Breast Cancer |
| | Y *out-of- | NRRLDVTVANGR:S:W | IQVLNVSLK (A03.01) | |
| | frame | KYGWSLLRVPQVNG | KSSSNVISY (A01.01, | |
| | | IQVLNVSLKSSSNVIS | A03.01) | |
| | | YE* | KYGWSLLRV (A24.02) | |
| | | | RSWKYGWSL (A02.01) | |
| | | | SLKSSSNVI (B08.01) | |
| | | | SWKYGWSLL (A24.02) | |
| | | | TVANGRSWK (A03.01) | |
| | | | VPQVNGIQV (B07.02) | |
| | | | VPQVNGIQVL (B07.02) | |
| | | | VTVANGRSWK | |
| | | | (A03.01) | |
| | | | WSLLRVPQV (B08.01) | |
| MAD1L1: | MAD1L1:MA | RLKEVFQTKIQEFRKA | HPGDCLIFKL (B07.02) | CLL |
| MAFK | FK | CYTLTGYQIDITTENQ | KLRVPGSSV (B07.02) | |
| | | YRLTSLYAEHPGDCLI | KLRVPGSSVL (B07.02) | |
| | | FK::LRVPGSSVLVTV | RVPGSSVLV (A02.01) | |
| | | PGL* | SVLVTVPGL (A02.01) | |
| | | | VPGSSVLVTV (B07.02) | |
| PPP1R1B | PPP1R1B:ST | AEVLKVIRQSAGQKT | ALLLRPRPPR (A03.01) | Breast Cancer |
| :STARD3 | ARD3 | TCGQGLEGPWERPPPL | ALSALLLRPR (A03.01) | |
| | | DESERDGGSEDQVED | | |
| | | PALS:A:LLLRPRPPRP | | |
| | | EVGAHQDEQAAQGA | | |
| | | DPRLGAQPACRGLP | | |
| | | GLLTVPQPEPLLAPP | | |
| | | SAA* | | |

Table 35F

| | | IN FRAME | | |
|---|---|---|---|---|
| | | DELETIONS and | | |
| | | FUSIONS ^{1,2} | | |
| BCR:ABL | BCR:ABL | ERAEWRENIREQQKK | LTINKEEAL (A02.01, | CML, AML |
| | | CFRSFSLTSVELQMLT | B08.01) | |
| | | NSCVKLQTVHSIPLTI | | |
| | | NKE::EALQRPVASDF | | |
| | | EPQGLSEAARWNSK | | |
| | | ENLLAGPSENDPNLF | | |
| | | VALYDFVASG | | |
| BCR:ABL | BCR:ABL | ELQMLTNSCVKLQTV | IVHSATGFK (A03.01) | CML, AML |
| | | HSIPLTINKEDDESPGL | ATGFKQSSK (A03.01) | |
| | | YGFLNVIVHSATGFKQ | | |
| | | SS:K:ALQRPVASDFE | | |
| | | PQGLSEAARWNSKE | | |
| | | NLLAGPSENDPNLFV | | |
| | | ALYDFVASGD | | |
| C11orf95: | C11orf95:REL | ISNSWDAHLGLGACG | ELFPLIFPA (A02.01, | Supretentorial |
| RELA | A | EAEGLGVQGAEEEEE | B08.01) | ependyomas |
| | | EEEEEEEEGAGVPACP | KGPELFPLI (A02.01, | |
| | | PKGP:E:LFPLIFPAEP | A24.02) | |
| | | AQASGPYVEIIEQPK | KGPELFPLIF (A24.02) | |
| | | QRGMRFRYKCEGRS | | |
| | | AGSIPGERSTD | | |
| CBFB:M | (variant “type | LQRLDGMGCLEFDEE | | AML |
| YH11 | a”) | RAQQEDALAQQAFEE | | |
| | | ARRRTREFEDRDRSH | | |
| | | REEME::VHELEKSKR | | |
| | | ALETQMEEMKTQLE | | |
| | | ELEDELQATEDAKL | | |
| | | RLEVNMQALKGQF | | |
| CD74:RO | (exon6:exon32) | KGSFPENLRHLKNTM | KPTDAPPKAGV | NSCLC, Crizotinib |
| S1 | | ETIDWKVFESWMHH | (B07.02) | resistance |
| | | WLLFEMSRHSLEQKP | | |
| | | TDAPPK::AGVPNKPG | | |
| | | IPKLLEGSKNSIQWE | | |
| | | KAEDNGCRITYYILEI | | |
| | | RKSTSNNLQNQ | | |
| EML4:ALK | EML4:ALK | SWENSDDSRNKLSKIP | QVYRRKHQEL | NSCLC |
| | | STPKLIPKVTKTADKH | (B08.01) | |
| | | KDVIINQAKMSTREK | STREKNSQV (B08.01) | |
| | | NSQ:V:YRRKHQELQ | VYRRKHQEL (A24.02, | |
| | | AMQMELQSPEYKLS | B08.01) | |
| | | KLRTSTIMTDYNPNY | | |
| | | CFAGKTSSISDL | | |
| FGFR3:T | FGFR3:TACC | EGHRMDKPANCTHDL | VLTVTSTDV (A02.01) | Bladder Cancer, |
| ACC3 | 3 | YMIMRECWHAAPSQR | VLTVTSTDVK (A03.01) | LUSC |
| | | PTFKQLVEDLDRVLT | | |
| | | VTSTD::VKATQEENR | | |
| | | ELRSRCEELHGKNLE | | |
| | | LGKIMDRFEEVVYQ | | |
| | | AMEEVQKQKELS | | |
| NAB:ST | NAB:STAT6 | RDNTLLLRRVELFSLS | IMSLWGLVS (A02.01) | Solitary fibrous |
| AT6 | “” | RQVARESTYLSSLKGS | IMSLWGLVSK | tumors |
| | | RLHPEELGGPPLKKLK | (A03.01) | |
| | | QE::ATSKSQIMSLWG | KLKQEATSK (A03.01) | |
| | | LVSKMPPEKVQRLY | QIMSLWGLV (A02.01) | |
| | | VDFPQHLRHLLGDW | SQIMSLWGL (A02.01, | |
| | | LESQPWEFLVGSDAF | A24.02, B08.01) | |
| | | CC | SQIMSLWGLV | |
| | | | (A02.01) | |
| | | | TSKSQIMSL (B08.01) | |
| NDRG1:E | NDRG1:ERG | MSREMQDVDLAEVKP | LLQEFDVQEA (A02.01) | Prostate Cancer |
| RG | | LVEKGETITGLLQEFD | LQEFDVQEAL (A02.01) | |
| | | VQ::EALSVVSEDQSL | | |
| | | FECAYGTPHLAKTE | | |
| | | MTASSSSDYGQTSK | | |
| | | MSPRVPQQDW | | |
| PML:RA | PML:RARA | VLDMHGFLRQALCRL | | Acute promyelocytic |
| RA | (exon3:exon3) | RQEEPQSLQAAVRTD | | leukemia |
| | | GFDEFKVRLQDLSSCI | | |
| | | TQGK:A:IETQSSSSEE | | |
| | | IVPSPPSPPPLPRIYKP | | |
| | | CFVCQDKSSGYHYG | | |
| | | VSACEGCKG | | |
| PML:RA | PML:RARA | RSSPEQPRPSTSKAVSP | | Acute promyelocytic |
| RA | (exon6:exon3) | PHLDGPPSPRSPVIGSE | | leukemia |
| | | VFLPNSNHVASGAGE | | |
| | | A:A:IETQSSSSEEIVPS | | |
| | | PPSPPPLPRIYKPCFV | | |
| | | CQDKSSGYHYGVSA | | |
| | | CEGCKG | | |
| RUNX1 | RUNX1(ex5)- | VARFNDLRFVGRSGR | GPREPRNRT (B07.02) | AML |
| | RUNX1T1(ex | GKSFTLTITVFTNPPQ | RNRTEKHSTM | |
| | 2) | VATYHRAIKITVDGPR | (B08.01) | |
| | | EPR:N:RTEKHSTMPD | | |
| | | SPVDVKTQSRLTPPT | | |
| | | MPPPPTTQGAPRTSS | | |
| | | FTPTTLTNGT | | |
| TMPRSS | TMPRSS2:ER | MALNS::EALSVVSED | ALNSEALSV (A02.01) | Prostate Cancer |
| 2:ERG | G | QSLFECAYGTPHLAKT | ALNSEALSVV (A02.01) | |
| | | EMTASSSSDYGQTSK | MALNSEALSV | |
| | | MSPRVPQQDW | (A02.01, B08.01) | |

¹ Underlined AAs represent non-native AAs
² Bolded AAs represent native AAs of the amino acid sequence encoded by the second of the two fused genes
³ Bolded and underlined AAs represent non-native AAs of the amino acid sequence encoded by the second of the two fused genes due to a frameshift.

Table 36 below provides a list of selected HLA-restricted BTK peptides for the purpose of this Application and the corresponding protein encoded by the HLA allele to which the mutant BTK peptide binds or is predicted to bind.

TABLE 36

| BTK PEPTIDE | HLA allele |
|---|---|
| SLLNYLREM | HLA-A02:04 |
| | HLA-A02:03 |
| | HLA-C03:02 |
| | HLA-A03:01 |
| | HLA-A32:01 |
| | HLA-A02:07 |
| | HLA-C14:03 |
| | HLA-C14:02 |
| | HLA-A31:01 |
| | HLA-A30:02 |
| | HLA-A74:01 |
| | HLA-C06:02 |
| | HLA-B15:03 |
| | HLA-B46:01 |
| | HLA-B13:02 |
| | HLA-A25:01 |
| | HLA-A29:02 |
| | HLA-C01:02 |
| EYMANGSLL | HLA-C14:02 |
| | HLA-C14:03 |
| | HLA-A33:03 |
| | HLA-C04:01 |
| | HLA-B15:09 |
| | HLA-B38:01 |
| TEYMANGSL | HLA-B14:02 |
| | HLA-B49:01 |
| | HLA-B44:03 |
| | HLA-B44:02 |
| | HLA-B37:01 |
| | HLA-B15:09 |
| | HLA-B41:01 |
| | HLA-B50:01 |
| MANGSLLNY | HLA-C02:02 |
| | HLA-C03:02 |
| | HLA-B53:01 |
| | HLA-C12:02 |
| | HLA-C12:03 |
| | HLA-A36:01 |
| | HLA-A26:01 |
| | HLA-A25:01 |
| | HLA-B57:01 |
| | HLA-A03:01 |
| | HLA-B46:01 |
| | HLA-B15:03 |
| | HLA-A33:03 |
| | HLA-B35:03 |
| | HLA-A11:01 |
| YMANGSLLNY | HLA-A29:02 |
| | HLA-A36:01 |
| | HLA-B46:01 |
| | HLA-A25:01 |
| | HLA-B15:01 |
| | HLA-A26:01 |
| | HLA-A30:02 |
| | HLA-A32:01 |

[0332] Table 37 provides a list of selected BTK peptides and the corresponding preferred protein encoded by the HLA allele to which the peptide binds or is predicted to bind, as applicable to the context of this Application.

TABLE 37

| PEPTIDE | ALLELE |
|---|---|
| ANGSLLNY | HLA-A36:01 |
| ANGSLLNYL | HLA-C15:02 |
| | HLA-C08:01 |
| | HLA-C06:02 |
| | HLA-A02:04 |
| | HLA-C12:02 |
| | HLA-B44:02 |
| | HLA-C17:01 |
| | HLA-B38:01 |
| ANGSLLNYLR | HLA-A74:01 |
| | HLA-A31:01 |
| EYMANGSL | HLA-C14:02 |
| | HLA-C14:03 |
| | HLA-A24:02 |
| EYMANGSLL | HLA-C14:02 |
| | HLA-C14:03 |
| | HLA-A33:03 |
| | HLA-C04:01 |
| | HLA-B15:09 |
| | HLA-B38:01 |
| EYMANGSLLN | HLA-A24:02 |
| | HLA-A23:01 |
| EYMANGSLLNY | HLA-A29:02 |
| GSLLNYLR | HLA-A31:01 |
| | HLA-A74:01 |
| GSLLNYLREM | HLA-B58:02 |
| | HLA-B57:01 |
| ITEYMANGS | HLA-A01:01 |
| ITEYMANGSL | HLA-A01:01 |
| ITEYMANGSLL | HLA-A01:01 |
| MANGSLLNY | HLA-C02:02 |
| | HLA-C03:02 |
| | HLA-B53:01 |
| | HLA-C12:02 |
| | HLA-C12:03 |
| | HLA-A36:01 |
| | HLA-A26:01 |
| | HLA-A25:01 |
| | HLA-B57:01 |
| | HLA-A03:01 |
| | HLA-B46:01 |
| | HLA-B15:03 |
| | HLA-A33:03 |
| | HLA-B35:03 |
| | HLA-A11:01 |
| MANGSLLNYL | HLA-C17:01 |
| | HLA-C02:02 |
| | HLA-B35:01 |
| | HLA-C03:03 |
| | HLA-C08:01 |
| | HLA-B35:03 |
| | HLA-C12:02 |
| | HLA-C01:02 |
| | HLA-C03:04 |
| | HLA-C08:02 |
| MANGSLLNYLR | HLA-A33:03 |
| | HLA-A74:01 |
| NGSLLNYL | HLA-B14:02 |
| NGSLLNYLR | HLA-A68:01 |
| | HLA-A33:03 |
| | HLA-A31:01 |
| | HLA-A74:01 |
| SLLNYLREM | HLA-A02:04 |
| | HLA-A02:03 |
| | HLA-C03:02 |
| | HLA-A03:01 |
| | HLA-A32:01 |
| | HLA-A02:07 |
| | HLA-C14:03 |
| | HLA-C14:02 |
| | HLA-A31:01 |
| | HLA-A30:02 |
| | HLA-A74:01 |
| | HLA-C06:02 |
| | HLA-B15:03 |
| | HLA-B46:01 |
| | HLA-B13:02 |
| | HLA-A25:01 |
| | HLA-A29:02 |
| | HLA-C01:02 |
| SLLNYLREMR | HLA-A74:01 |
| | HLA-A31:01 |
| TEYMANGSL | HLA-B14:02 |
| | HLA-B49:01 |
| | HLA-B44:03 |
| | HLA-B44:02 |
| | HLA-B37:01 |
| | HLA-B15:09 |
| | HLA-B41:01 |
| | HLA-B50:01 |
| TEYMANGSLL | HLA-B40:01 |
| | HLA-B44:03 |
| | HLA-B49:01 |
| | HLA-B44:02 |
| | HLA-B40:02 |
| TEYMANGSLLNY | HLA-B44:03 |
| YMANGSLL | HLA-B15:09 |
| | HLA-C03:04 |
| | HLA-C03:03 |
| | HLA-C17:01 |
| | HLA-C03:02 |
| | HLA-C14:03 |
| | HLA-C14:02 |
| | HLA-C04:01 |
| | HLA-C02:02 |
| | HLA-A01:01 |
| YMANGSLLN | HLA-A29:02 |
| | HLA-A01:01 |
| YMANGSLLNY | HLA-A29:02 |
| | HLA-A36:01 |
| | HLA-B46:01 |
| | HLA-A25:01 |
| | HLA-B15:01 |
| | HLA-A26:01 |
| | HLA-A30:02 |
| | HLA-A32:01 |

[0333] Exemplary mutations in the EGFR gene, which are prevalent in various types of cancer are presented in Table 40A-40D. The table also provides exemplary EGFR neoantigenic peptides. Mutations involving single amino acid substitutions prevalent in cancer are listed in Tables 40A-40C. Exemplary mutations involving a deletion or deletion and insertion are resented in Table 40D.

TABLE 40A
Exemplary EGFR point mutations in cancer and mutant peptides

| | | Mutation | | | |
|---|---|---|---|---|---|
| | | (amino | Mutation Sequence | | |
| Gene | Nucleotide | acid) | Context | Neopeptides | Cancer |
| EGFR | c.1786C > T | p.P596S | CTGRGPDNCIQCAHYID | CVKTCSAGV, | GBM |
| | | | GPRCVRTC[p.P596S] | VKTCSAGVM, | |
| | | | SAGVMGENNTLVWKYAD | CVKTCSAGVM | |
| | | | AGHVCHLCH | | |
| EGFR | c.1787C > T | p.P596L | CTGRCPDNCIQCAHYID | CVKTCLAGV, | GBM |
| | | | GPHCVKTC[p.S596L] | GPHCVKTCL, | |
| | | | LAGVMGENNTLVWKYAD | VKTCLAGVM | |
| | | | AGHVCHLCH | | |
| EGFR | c.1793G > C | p.G598A | GRGPDNCIQCAHYIDGP | CVKTCPAAV, | GBM |
| | | | HCVKTCPA[p.G598A] | VKTCPAAVM, | |
| | | | AVMGENNTLVWKYADAG | AVMGENNTL, | |
| | | | HVCHLCHPN | AVMGENNTLV, | |
| | | | | CVKTCPAAVM, | |
| | | | | AAVMGENNTL | |
| EGFR | c.1793G > T | p.G598V | GRGPDNCIQCAHYIDGP | CVKCPAVV, | GBM |
| | | | HCVKTCPA[p.G598V] | VKTCPAVVM, | |
| | | | VVMGENNTLVWKYADAG | VVMGENNTLV, | |
| | | | HVCHLCHPN | CVKTCPAVVM | |
| EGFR | c.185T > G | p.162R | KLTQLGTFEDHFLSLQR | MFNNCEVVR, | GBM |
| | | | MFNNCLVV[p.L62R]R | EVVRGNLEI, | |
| | | | GNLEITYVQRNYDLSFL | VRGNLETTY, | |
| | | | KTQEVAG | RMFNNCEVVR, | |
| | | | | VVRGNLEITY, | |
| | | | | CEVVRGNIE | |
| EGFR | c.2125G > A | p.E709K | QERELVEPLTPSGEAPN | RILKKTEFK, | GBM |
| | | | QALLRILK[p.E709K] | ILKKTEFKK, | |
| | | | KTEFKKIKVLGSGAFGT | QALLRILKK, | |
| | | | VYKGLWIP | LRILKTEF, | |
| | | | | RILKKTEFKK, | |
| | | | | NQALLRILKK, | |
| | | | | LLRLKKTEF | |
| EGFR | c.2156G > C | p.G719A | PSGEAPNQALLRILKET | A5GAFGTVY, | LUAD |
| | | | EFKKIKVL[p.G719A] | VLASGAFGT, | |
| | | | ASGAFGTVYKGLWIPEG | LASAFGTY, | |
| | | | EKVKIPVAI | KIKVLASGA, | |
| | | | | KVLASGAFG, | |
| | | | | IKVLASGAF, | |
| | | | | KKIKVLASG, | |
| | | | | VLASG, | |
| | | | | VLASGAFGTV, | |
| | | | | ASGAFGTVYK, | |
| | | | | KIKVLASGAF, | |
| | | | | LASGAFGTVY, | |
| | | | | KKIKVLASGA, | |
| | | | | TEFKKIKVIA | |
| EGFR | c.2235, | p.ELREA746deI | GAFGTVYKGLWIPEGEK | AIKTSPKANK, | LUAD |
| | 2249 > \| | | VKIPVAIK | KVKIPVAIKT, | |
| | GGAATTA | | [p.ELREA745del]TS | KT5PKANKEI | |
| | AGAGAAG | | PKANKEILDEAYVMASV | | |
| | C | | DNPHVCRLLGICLTSTV | | |
| | | | QLIT | | |
| EGFR | c.2303G > T | p.57681 | AIKELREQATSPKANKE | MAIVDNPHV, | LUAD |
| | | | ILDEAYVMA[p.57681] | VMAIVDNPH, | |
| | | | VDNPHVCRLLGICLTST | DEAYVMAIV, | |
| | | | VQLITQLM | LDEAYYMAI, | |
| | | | | RDEAYVMAI, | |
| | | | | VMAIVDNPHV, | |
| | | | | AIVDNPHVCR, | |
| | | | | YVMAIVDNPH, | |
| | | | | DEAYVMAIVD | |
| EGFR | c.2512C > A | p.L838M | YLLNVVCVQLAKGMNYL | RLVHRDMAA, | KIRC |
| | | | EDRRLVHRD[p.L838M] | DMAARNVLV, | |
| | | | MAARNVLVKTPQHVKIT | MAARNVLVK, | |
| | | | DFGLAKLLG | LVHRDMARR, | |
| | | | | RDMAARNVL, | |
| | | | | RLVHRDMAAR, | |
| | | | | DMAARNVLVK, | |
| | | | | HRDMAARNVL, | |
| | | | | RDMAARNVLV | |
| EGFR | c.2573T > G | p.L858R | LVHRDLAARNVLVKTPQ | KITDGRAK, | LUAD |
| | | | HIVKITDEG[p.L858R] | HVKITDFGR, | |
| | | | RAKLGAEEKEYHAFGGR | FGRAKLLGA, | |
| | | | VPIKWMAL | HVKITDFGRA, | |
| | | | | RAKLIGAEEK | |
| EGFR | c.2582T > A | p.L861Q | RDLAARNVLVKTPQHVR | LAKQLGAEEK, | LUSC |
| | | | ITDFGLAK[p.L861Q] | KQLGAEEKEY | |
| | | | QLGAEEKEYHAEGGKVP | | |
| | | | IKWMALES1 | | |
| EGFR | c.323G > A | p.R108K | QEVAGYVLIALNTVERI | QHKGNMYY, | GBM |
| | | | PLENLQAIE[p.R108K] | LQHKGNMY, | |
| | | | KGNMYYENSYALVLSNY | LQHKGNMYY, | |
| | | | DANKTGLK | KGNMYYENSY | |
| EGFR | c.754C > T | p.R252C | SPSDECLMNQCAAGEIG | RESDCLVCC | GBM |
| | | | PNESDLVC[p.R252C] | | |
| | | | CKFRDEATCKDTCPPLM | | |
| | | | LYNPTTYQM | | |
| EGFR | c.865G > A | p.A289T | CPPLMLYNPTTYQMDVN | YSFGTTCVK, | GBM |
| | | | PEGKYSFG[p.A289T] | TTCVKKCPR, | |
| | | | TTCVKKCPRNYVVTDHG | GKYSFGTTC, | |
| | | | SCVRACGAD | YSFGTTCVKK, | |
| | | | | KYSFGTTCVK, | |
| | | | | GTTCVKKCPR, | |
| | | | | GKYSFGTTCV | |
| EGFR | c.866C > A | p.A289D | CPPLMLYNPTTYQMDVN | YSFGDTCVK, | GBM |
| | | | PEGKYSFG[p.A289D] | DTCVKKCPR, | |
| | | | TCVKKCPRNYVVTDHGS | GKYSFGDTC, | |
| | | | CVRACGAD | YSFGDTCVKK, | |
| | | | | KYSFGTCVK, | |
| | | | | GKYSFGDTCV | |
| EGFR | c.866C > T | p.A289V | CPPLMLYNPTTYQMDVN | YSFGVTCVK, | GBM |
| | | | PEGKYSFG[p.A289V] | KYSFGVTCV, | |
| | | | VTCVKKCPRNYVVTDHG | VTCVKKCPR, | |
| | | | SCVRACGAD | GKYSFGVTC, | |
| | | | | YSFGVTCVKK, | |
| | | | | KYSFGVTCVK, | |
| | | | | GVTCVKKCPR, | |
| | | | | GKYSFGVTCV | |
| EGFR | c.910C > T | p.H304Y | VNPEGKYSFGATCVKKI | VVTDYGSCV, | GBM |
| | | | CPRNYVVTD[p.H304Y] | YVVTDYGSCV, | |
| | | | YGSCVRACGADSYEMEE | VVTDYGSCVR, | |
| | | | DGVRKCKKC | CPRNYVVTDY | |

TABLE 40B
Exemplary EGFR point
mutations in cancer and mutant peptides

| Mutation | | | |
|---|---|---|---|
| amino acid | Neo- | | |
| (nucleotide) | peptides | Cancer | Allele |
| EGFRp.L858R | FGRAKLLGA | Lung | HLA.B08.01 |
| (uc003tqk.2) | | adeno- | |
| | | carcinoma | |
| EGFRp.L858R | KITDFGRAK | Lung | HLA.A03.01 |
| (uc003tqk.2) | | adeno- | HLA.A11.01 |
| | | carcinoma | HLA.A30.01 |

TABLE 40C
Exemplary EGFR point
mutations in cancer and mutant peptides

| | Mutation | | |
|---|---|---|---|
| EGFR | Sequence | | |
| Mutation | Context | Neopeptides | Disease |
| EGFR, | GICLTSTV | VQLIMQLMPF, | CRC |
| T790M | QLIMQLMP | STVQLIMQLM, | |
| | FGCLLDY | QLIMQLMPF, | |
| | | MQLMPFGCLL, | |
| | | LIMQLMPF, | |
| | | LTSTVQLIM, | |
| | | STVQLIMQL, | |
| | | TSTVQLIMQL, | |
| | | TVQLIMQL, | |
| | | TVQLIMQLM, | |
| | | VQLIMQLM, | |
| | | CLTSTVQLIM, | |
| | | IMQLMPFGC, | |
| | | IMQLMPFGCL, | |
| | | LIMQLMPFG, | |
| | | LIMQLMPFGC, | |
| | | QLIMQLMPFG | |
| EGFR, | SLNITSLG | IIRNRGENSCK | NSCLC, |
| S492R | LRSLKEIS | | PRAD |
| | DGDVIISG | | |
| | NKNLCYAN | | |
| | TINWKKLF | | |
| | GTSGQKTK | | |
| | IIRNRGEN | | |
| | SCKATGQV | | |
| | CHALCSPE | | |
| | GCWGPEPR | | |
| | DCVSCRNV | | |
| | SRGRECVD | | |
| | KCNLL | | |

TABLE 40D
Exemplary EGFR deletion mutation,
fusion mutations in cancer

| | Mutation | | |
|---|---|---|---|
| EGFR | Sequence | Neo- | |
| Mutation | Context | peptides | Disease |
| EGFRvIII | MRPSGTAGAALLALLAALC | ALEEKKGNYV | GBM |
| (internal | PASRALEEKK:G:NYVVTD | | |
| deletion) | HGSCVRACGADSYEMEEDG | | |
| | VRKCKKCEGPCRKVCNGIG | | |
| | IGEFKD | | |
| EGFR: | LPQPPICTIDVYMIMVKCW | IQLQDKFEHL | GBM, |
| SEPT14 | MIDADSRPKFRELIIEFSK | QLQDKFEHL | Glioma, |
| | MARDPQRYLVIQ::LQDKF | QLQDKFEHLK | Head and |
| | EHLKMIQQEEIRKLEEEKK | YLVIQLQDKF | Neck |
| | QLEGEIIDFYKMKAASEAL | | Cancer |
| | QTQLSTD | | |

[0334] the Tables above, for one or more of the exemplary fusions, a sequence that comes before the first “:” belongs to an exon sequence of a polypeptide encoded by a first gene, a sequence that comes after the second “:” belongs to an exon sequence of a polypeptide encoded by a second gene, and an amino acid that appears between “:” symbols is encoded by a codon that is split between the exon sequence of a polypeptide encoded by a first gene and the exon sequence of a polypeptide encoded by a second gene.

[0335] However, in some embodiments, for example, NAB:STAT6, the NAB exon is linked to the 5′ UTR of STAT6 and the first amino acid that appears after the Junction is the normal start codon of STAT6 (there is no frame present at this site (as it is not normally translated).

[0336] AR-V7 in the tables above can also be considered, in some embodiments, a splice variant of the AR gene that encodes a protein that lacks the ligand binding domain found in full length AR.

[0337] In some embodiments, sequencing methods are used to identify tumor specific mutations. Any suitable sequencing method can be used according to the present disclosure, for example, Next Generation Sequencing (NGS) technologies. Third Generation Sequencing methods might substitute for the NGS technology in the future to speed up the sequencing step of the method. For clarification purposes: the terms “Next Generation Sequencing” or “NGS” in the context of the present disclosure mean all novel high throughput sequencing technologies which, in contrast to the “conventional” sequencing methodology known as Sanger chemistry, read nucleic acid templates randomly in parallel along the entire genome by breaking the entire genome into small pieces. Such NGS technologies (also known as massively parallel sequencing technologies) are able to deliver nucleic acid sequence information of a whole genome, exome, transcriptome (all transcribed sequences of a genome) or methylome (all methylated sequences of a genome) in very short time periods, e.g. within 1-2 weeks, for example, within 1-7 days or within less than 24 hours and allow, in principle, single cell sequencing approaches. Multiple NGS platforms which are commercially available or which are mentioned in the literature can be used in the context of the present disclosure e.g. those described in detail in WO 2012/159643.

[0338] In certain embodiments, the peptide described herein can comprise, but is not limited to, about 5, about 6, about 7, about 8, about 9, about 10, about 11, about 12, about 13, about 14, about 15, about 16, about 17, about 18, about 19, about 20, about 21, about 22, about 23, about 24, about 25, about 26, about 27, about 28, about 29, about 30, about 31, about 32, about 33, about 34, about 35, about 36, about 37, about 38, about 39, about 40, about 41, about 42, about 43, about 44, about 45, about 46, about 47, about 48, about 49, about 50, about 60, about 70, about 80, about 90, about 100, about 110, about 120, about 150, about 200, about 300, about 350, about 400, about 450, about 500, about 600, about 700, about 800, about 900, about 1,000, about 1,500, about 2,000, about 2,500, about 3,000, about 4,000, about 5,000, about 7,500, about 10,000 amino acids or greater amino acid residues, and any range derivable therein. In specific embodiments, a neoantigenic peptide molecule is equal to or less than 100 amino acids.

[0339] In some embodiments, the peptides can be from about 8 and about 50 amino acid residues in length, or from about 8 and about 30, from about 8 and about 20, from about 8 and about 18, from about 8 and about 15, or from about 8 and about 12 amino acid residues in length. In some embodiments, the peptides can be from about 8 and about 500 amino acid residues in length, or from about 8 and about 450, from about 8 and about 400, from about 8 and about 350, from about 8 and about 300, from about 8 and about 250, from about 8 and about 200, from about 8 and about 150, from about 8 and about 100, from about 8 and about 50, or from about 8 and about 30 amino acid residues in length.

[0340] In some embodiments, the peptides can be at least 8, 9, 10, 11, 12, 13, 14, 15, 16, 17, 18, 19, 20, 21, 22, 23, 24, 25, 26, 27, 28, 29, 30, 31, 32, 33, 34, 35, 36, 37, 38, 39, 40, 41, 42, 43, 44, 45, 46, 47, 48, 49, 50, or more amino acid residues in length. In some embodiments, the peptides can be at least 8, 9, 10, 11, 12, 13, 14, 15, 16, 17, 18, 19, 20, 21, 22, 23, 24, 25, 26, 27, 28, 29, 30, 31, 32, 33, 34, 35, 36, 37, 38, 39, 40, 41, 42, 43, 44, 45, 46, 47, 48, 49, 50, 55, 60, 70, 80, 90, 100, 150, 200, 250, 300, 350, 400, 450, 500, or more amino acid residues in length. In some embodiments, the peptides can be at most 8, 9, 10, 11, 12, 13, 14, 15, 16, 17, 18, 19, 20, 21, 22, 23, 24, 25, 26, 27, 28, 29, 30, 31, 32, 33, 34, 35, 36, 37, 38, 39, 40, 41, 42, 43, 44, 45, 46, 47, 48, 49, 50, or less amino acid residues in length. In some embodiments, the peptides can be at most 8, 9, 10, 11, 12, 13, 14, 15, 16, 17, 18, 19, 20, 21, 22, 23, 24, 25, 26, 27, 28, 29, 30, 31, 32, 33, 34, 35, 36, 37, 38, 39, 40, 41, 42, 43, 44, 45, 46, 47, 48, 49, 50, 55, 60, 70, 80, 90, 100, 150, 200, 250, 300, 350, 400, 450, 500, or less amino acid residues in length.

[0341] In some embodiments, the peptides has a total length of at least 8, at least 9, at least 10, at least 11, at least 12, at least 13, at least 14, at least 15, at least 16, at least 17, at least 18, at least 19, at least 20, at least 21, at least 22, at least 23, at least 24, at least 25, at least 26, at least 27, at least 28, at least 29, at least 30, at least 40, at least 50, at least 60, at least 70, at least 80, at least 90, at least 100, at least 150, at least 200, at least 250, at least 300, at least 350, at least 400, at least 450, or at least 500 amino acids.

[0342] In some embodiments, the peptides has a total length of at most 8, at most 9, at most 10, at most 11, at most 12, at most 13, at most 14, at most 15, at most 16, at most 17, at most 18, at most 19, at most 20, at most 21, at most 22, at most 23, at most 24, at most 25, at most 26, at most 27, at most 28, at most 29, at most 30, at most 40, at most 50, at most 60, at most 70, at most 80, at most 90, at most 100, at most 150, at most 200, at most 250, at most 300, at most 350, at most 400, at most 450, or at most 500 amino acids.

[0343] A longer peptide can be designed in several ways. In some embodiments, when HLA-binding peptides are predicted or known, a longer peptide comprises (1) individual binding peptides with extensions of 2-5 amino acids toward the N- and C-terminus of each corresponding gene product; or (2) a concatenation of some or all of the binding peptides with extended sequences for each. In other embodiments, when sequencing reveals a long (>10 residues) neoepitope sequence present in the tumor (e.g., due to a frameshift, read-through or intron inclusion that leads to a novel peptide sequence), a longer peptide could consist of the entire stretch of novel tumor-specific amino acids as either a single longer peptide or several overlapping longer peptides. In some embodiments, use of a longer peptide is presumed to allow for endogenous processing by patient cells and can lead to more effective antigen presentation and induction of T cell responses. In some embodiments, two or more peptides can be used, where the peptides overlap and are tiled over the long neoantigenic peptide.

[0344] In some embodiments, the peptides can have a pI value of from about 0.5 to about 12, from about 2 to about 10, or from about 4 to about 8. In some embodiments, the peptides can have a pI value of at least 4.5, 5, 5.5, 6, 6.5, 7, 7.5, or more. In some embodiments, the peptides can have a pI value of at most 4.5, 5, 5.5, 6, 6.5, 7, 7.5, or less.

[0345] In some embodiments, the peptide described herein can be in solution, lyophilized, or can be in crystal form. In some embodiments, the peptide described herein can be prepared synthetically, by recombinant DNA technology or chemical synthesis, or can be isolated from natural sources such as native tumors or pathogenic organisms. Neoepitopes can be synthesized individually or joined directly or indirectly in the peptide. Although the peptide described herein can be substantially free of other naturally occurring host cell proteins and fragments thereof, in some embodiments, the peptide can be synthetically conjugated to be joined to native fragments or particles.

[0346] In some embodiments, the peptide described herein can be prepared in a wide variety of ways. In some embodiments, the peptides can be synthesized in solution or on a solid support according to conventional techniques. Various automatic synthesizers are commercially available and can be used according to known protocols. See, for example, Stewart & Young, Solid Phase Peptide Synthesis, 2d. Ed., Pierce Chemical Co., 1984. Further, individual peptides can be joined using chemical ligation to produce larger peptides that are still within the bounds of the present disclosure.

[0347] Alternatively, recombinant DNA technology can be employed wherein a nucleotide sequence which encodes the peptide inserted into an expression vector, transformed or transfected into an appropriate host cell and cultivated under conditions suitable for expression. These procedures are generally known in the art, as described generally in Sambrook et al., Molecular Cloning, A Laboratory Manual, Cold Spring Harbor Press, Cold Spring Harbor, N.Y. (1989). Thus, recombinant peptides, which comprise one or more neoantigenic peptides described herein, can be used to present the appropriate T cell epitope.

[0348] In some embodiments, the peptide is encoded by a gene with a point mutation resulting in an amino acid substitution of the native peptide. In some embodiments, the peptide is encoded by a gene with a point mutation resulting in frame shift mutation. A frameshift occurs when a mutation disrupts the normal phase of a gene's codon periodicity (also known as “reading frame”), resulting in the translation of a non-native protein sequence. It is possible for different mutations in a gene to achieve the same altered reading frame. In some embodiments, the peptide is encoded by a gene with a mutation resulting in fusion polypeptide, in-frame deletion, insertion, expression of endogenous retroviral polypeptides, and tumor-specific overexpression of polypeptides. In some embodiments, the peptide is encoded by a fusion of a first gene with a second gene. In some embodiments, the peptide is encoded by an in-frame fusion of a first gene with a second gene. In some embodiments, the peptide is encoded by a fusion of a first gene with an exon of a splice variant of the first gene. In some embodiments, the peptide is encoded by a fusion of a first gene with a cryptic exon of the first gene. In some embodiments, the peptide is encoded by a fusion of a first gene with a second gene, wherein the peptide comprises an amino acid sequence encoded by an out of frame sequence resulting from the fusion.

[0349] In some aspects, the present disclosure provides a composition comprising at least two or more than two peptides. In some embodiments, the composition described herein contains at least two distinct peptides. In some embodiments, the composition described herein contains a first peptide comprising a first neoepitope and a second peptide comprising a second neoepitope. In some embodiments, the first and second peptides are derived from the same protein. The at least two distinct peptides may vary by length, amino acid sequence or both. The peptides can be derived from any protein known to or have been found to contain a tumor specific mutation. In some embodiments, the composition described herein comprises a first peptide comprising a first neoepitope of a protein and a second peptide comprising a second neoepitope of the same protein, wherein the first peptide is different from the second peptide, and wherein the first neoepitope comprises a mutation and the second neoepitope comprises the same mutation. In some embodiments, the composition described herein comprises a first peptide comprising a first neoepitope of a first region of a protein and a second peptide comprising a second neoepitope of a second region of the same protein, wherein the first region comprises at least one amino acid of the second region, wherein the first peptide is different from the second peptide and wherein the first neoepitope comprises a first mutation and the second neoepitope comprises a second mutation. In some embodiments, the first mutation and the second mutation are the same. In some embodiments, the mutation is selected from the group consisting of a point mutation, a splice-site mutation, a frameshift mutation, a read-through mutation, a gene fusion mutation and any combination thereof.

[0350] In some embodiments, the peptide can be derived from a protein with a substitution mutation, e.g., the KRAS G12C, G12D, G12V, Q61H or Q61L mutation, or the NRAS Q61K or Q61R mutation, or BTK C481S mutation, or EGFR S492R, or the EGFR T490M mutation. The substitution may be positioned anywhere along the length of the peptide. For example, it can be located in the N terminal third of the peptide, the central third of the peptide or the C terminal third of the peptide. In another embodiment, the substituted residue is located 2-5 residues away from the N terminal end or 2-5 residues away from the C terminal end. The peptides can be similarly derived from tumor specific insertion mutations where the peptide comprises one or more, or all of the inserted residues.

[0351] In some embodiments, the first peptide comprises at least one an additional mutation. In some embodiments, one or more of the at least one additional mutation is not a mutation in the first neoepitope. In some embodiments, one or more of the at least one additional mutation is a mutation in the first neoepitope. In some embodiments, the second peptide comprises at least one additional mutation. In some embodiments, one or more of the at least one additional mutation is not a mutation in the second neoepitope. In some embodiments, one or more of the at least one additional mutation is a mutation in the second neoepitope.

[0352] In some aspects, the present disclosure provides a composition comprising a single polypeptide comprises the first peptide and the second peptide, or a single polynucleotide encodes the first peptide and the second peptide. In some embodiments, the composition provided herein comprises one or more additional peptides, wherein the one or more additional peptides comprise a third neoepitope. In some embodiments, the first peptide and the second peptide are encoded by a sequence transcribed from the same transcription start site. In some embodiments, the first peptide is encoded by a sequence transcribed from a first transcription start site and the second peptide is encoded by a sequence transcribed from a second transcription start site. In some embodiments, wherein the polypeptide has a length of at least 26; 27; 28; 29; 30; 40; 50; 60; 70; 80; 90; 100; 150; 200; 250; 300; 350; 400; 450; 500; 600; 700; 800; 900; 1,000; 1,500; 2,000; 2,500; 3,000; 4,000; 5,000; 7,500; or 10,000 amino acids. In some embodiments, the polypeptide comprises a first sequence with at least 60%, 61%, 62%, 63%, 64%, 65%, 66%, 67%, 68%, 69%, 70%, 71%, 72%, 73%, 74%, 75%, 76%, 77%, 78%, 79%, 80%, 81%, 82%, 83%, 84%, 85%, 86%, 87%, 88%, 89%, 90%, 91%, 92%, 93%, 94%, 95%, 96%, 97%, 98%, or 99% sequence identity to a corresponding wild-type sequence; and a second sequence with at least 60%, 61%, 62%, 63%, 64%, 65%, 66%, 67%, 68%, 69%, 70%, 71%, 72%, 73%, 74%, 75%, 76%, 77%, 78%, 79%, 80%, 81%, 82%, 83%, 84%, 85%, 86%, 87%, 88%, 89%, 90%, 91%, 92%, 93%, 94%, 95%, 96%, 97%, 98%, or 99% sequence identity to a corresponding wild-type sequence. In some embodiments, the polypeptide comprises a first sequence of at least 8 or 9 contiguous amino acids with at least 60%, 61%, 62%, 63%, 64%, 65%, 66%, 67%, 68%, 69%, 70%, 71%, 72%, 73%, 74%, 75%, 76%, 77%, 78%, 79%, 80%, 81%, 82%, 83%, 84%, 85%, 86%, 87%, 88%, 89%, 90%, 91%, 92%, 93%, 94%, 95%, 96%, 97%, 98%, or 99% sequence identity to a corresponding wild-type sequence; and a second sequence of at least 16 or 17 contiguous amino acids with at least 60%, 61%, 62%, 63%, 64%, 65%, 66%, 67%, 68%, 69%, 70%, 71%, 72%, 73%, 74%, 75%, 76%, 77%, 78%, 79%, 80%, 81%, 82%, 83%, 84%, 85%, 86%, 87%, 88%, 89%, 90%, 91%, 92%, 93%, 94%, 95%, 96%, 97%, 98%, or 99% sequence identity to a corresponding wild-type sequence.

[0353] In some embodiments, the second peptide is longer than the first peptide. In some embodiments, the first peptide is longer than the second peptide. In some embodiments, the first peptide has a length of at least 9; 10; 11; 12; 13; 14; 15; 16; 17; 18; 19; 20; 21; 22; 23; 24; 25; 26; 27; 28; 29; 30; 40; 50; 60; 70; 80; 90; 100; 150; 200; 250; 300; 350; 400; 450; 500; 600; 700; 800; 900; 1,000; 1,500; 2,000; 2,500; 3,000; 4,000; 5,000; 7,500; or 10,000 amino acids. In some embodiments, the second peptide has a length of at least 17; 18; 19; 20; 21; 22; 23; 24; 25; 26; 27; 28; 29; 30; 40; 50; 60; 70; 80; 90; 100; 150; 200; 250; 300; 350; 400; 450; 500; 600; 700; 800; 900; 1,000; 1,500; 2,000; 2,500; 3,000; 4,000; 5,000; 7,500; or 10,000 amino acids. In some embodiments, the first peptide comprises a sequence of at least 9 contiguous amino acids with at least 60%, 61%, 62%, 63%, 64%, 65%, 66%, 67%, 68%, 69%, 70%, 71%, 72%, 73%, 74%, 75%, 76%, 77%, 78%, 79%, 80%, 81%, 82%, 83%, 84%, 85%, 86%, 87%, 88%, 89%, 90%, 91%, 92%, 93%, 94%, 95%, 96%, 97%, 98%, or 99% identity to a corresponding wild-type sequence. In some embodiments, the second peptide comprises a sequence of at least 17 contiguous amino acids with at least 60%, 61%, 62%, 63%, 64%, 65%, 66%, 67%, 68%, 69%, 70%, 71%, 72%, 73%, 74%, 75%, 76%, 77%, 78%, 79%, 80%, 81%, 82%, 83%, 84%, 85%, 86%, 87%, 88%, 89%, 90%, 91%, 92%, 93%, 94%, 95%, 96%, 97%, 98%, or 99% sequence identity to a corresponding wild-type sequence.

[0354] In some embodiments, the first peptide, the second peptide or both comprise at least one flanking sequence, wherein the at least one flanking sequence is upstream or downstream of the neoepitope. In some embodiments, the at least one flanking sequence has at least 60%, 61%, 62%, 63%, 64%, 65%, 66%, 67%, 68%, 69%, 70%, 71%, 72%, 73%, 74%, 75%, 76%, 77%, 78%, 79%, 80%, 81%, 82%, 83%, 84%, 85%, 86%, 87%, 88%, 89%, 90%, 91%, 92%, 93%, 94%, 95%, 96%, 97%, 98%, 99% or 100% sequence identity to a corresponding wild-type sequence. In some embodiments, the at least one flanking sequence comprises a non-wild-type sequence. In some embodiments, the at least one flanking sequence is a N-terminus flanking sequence. In some embodiments, the at least one flanking sequence is a C-terminus flanking sequence. In some embodiments, the at least one flanking sequence of the first peptide has at least 60%, 61%, 62%, 63%, 64%, 65%, 66%, 67%, 68%, 69%, 70%, 71%, 72%, 73%, 74%, 75%, 76%, 77%, 78%, 79%, 80%, 81%, 82%, 83%, 84%, 85%, 86%, 87%, 88%, 89%, 90%, 91%, 92%, 93%, 94%, 95%, 96%, 97%, 98%, 99% or 100% sequence identity to the at least one flanking sequence of the second peptide. In some embodiments, the at least one flanking region of the first peptide is different from the at least one flanking region of the second peptide. In some embodiments, the at least one flanking residue comprises the mutation.

[0355] In some embodiments, neoantigenic peptide with the flanking sequences comprises a polypeptide, which can be represented by a formula (N-terminal Xaa)_{N}-(Xaa_{BTK})_{P}-(Xaa-C terminal)c, where (Xaa_{BTK})_{P} is a mutant BTK peptide sequence comprising at least 8 contiguous amino acids of a mutant BTK protein, P is an integer greater than 7; N is (i) 0 or (ii) an integer greater than 2; (N-terminal Xaa)_{N} is any amino acid sequence heterologous to the mutant protein; C is (i) 0 or (ii) an integer greater than 2; (Xaa-C terminal)_{C} is any amino acid sequence heterologous to the mutant BTK protein; and, both N and C are not 0.

[0356] In some embodiments, neoantigenic peptide with the flanking sequences comprises a polypeptide, which can be represented by a formula (N-terminal Xaa)_{N}-(Xaa_{EGFR})_{P}-(Xaa-C terminal)c, where (Xaa_{EGFR})_{P} is a mutant EGFR peptide sequence comprising at least 8 contiguous amino acids of a mutant EGFR protein, P is an integer greater than 7; N is (i) 0 or (ii) an integer greater than 2; (N-terminal Xaa)_{N} is any amino acid sequence heterologous to the mutant EGFR protein; C is (i) 0 or (ii) an integer greater than 2; (Xaa-C terminal)_{C} is any amino acid sequence heterologous to the mutant EGFR protein; and, both N and C are not 0.

[0357] In some embodiments, a peptide comprises a neoepitope sequence comprising at least one mutant amino acid. In some embodiments, a peptide comprises a neoepitope sequence comprising at least 1, 2, 3, 4, 5, 6, 7, 8, 9, 10, 11, 12, 13, 14, 15, 16, 17, 18, 19, 20, 21, 22, 23, 24, 25, 26, 27, 28, 29, 30 or more mutant amino acids. In some embodiments, a peptide comprises a neoepitope sequence derived from a protein comprising at least one mutant amino acid and at least 1, 2, 3, 4, 5, 6, 7, 8, 9, 10, 11, 12, 13, 14, 15, 16, 17, 18, 19, 20, 21, 22, 23, 24, 25, 26, 27, 28, 29, 30 or more non-mutant amino acids. In some embodiments, a peptide comprises a neoepitope sequence derived from a protein comprising at least one mutant amino acid and at least 1, 2, 3, 4, 5, 6, 7, 8, 9, 10, 11, 12, 13, 14, 15, 16, 17, 18, 19, 20, 21, 22, 23, 24, 25, 26, 27, 28, 29, 30 or more non-mutant amino acids upstream of the least one mutant amino acid. In some embodiments, a peptide comprises a neoepitope sequence derived from a protein comprising at least one mutant amino acid and at least 1, 2, 3, 4, 5, 6, 7, 8, 9, 10, 11, 12, 13, 14, 15, 16, 17, 18, 19, 20, 21, 22, 23, 24, 25, 26, 27, 28, 29, 30 or more non-mutant amino acids downstream of the least one mutant amino acid. In some embodiments, a peptide comprises a neoepitope sequence derived from a protein comprising at least one mutant amino acid; at least 1, 2, 3, 4, 5, 6, 7, 8, 9, 10, 11, 12, 13, 14, 15, 16, 17, 18, 19, 20, 21, 22, 23, 24, 25, 26, 27, 28, 29, 30 or more non-mutant amino acids upstream of the least one mutant amino acid; and at least 1, 2, 3, 4, 5, 6, 7, 8, 9, 10, 11, 12, 13, 14, 15, 16, 17, 18, 19, 20, 21, 22, 23, 24, 25, 26, 27, 28, 29, 30 or more non-mutant amino acids downstream of the least one mutant amino acid.

[0358] In some embodiments, a peptide comprises a neoantigenic peptide sequence depicted in Tables 1 or 2. In some embodiments, a peptide comprises a neoepitope sequence depicted in Tables 1 or 2. In some embodiments, a peptide comprises a neoepitope sequence comprising at least one mutant amino acid (underlined amino acid) as depicted in Tables 1 or 2. In some embodiments, a peptide comprises a neoepitope sequence comprising at least 1, 2, 3, 4, 5, 6, 7, 8, 9, 10, 11, 12, 13, 14, 15, 16, 17, 18, 19, 20, 21, 22, 23, 24, 25, 26, 27, 28, 29, 30 or more mutant amino acids (underlined amino acids) as depicted in Tables 1 or 2. In some embodiments, a peptide comprises a neoantigenic peptide sequence depicted in Tables 34 or 36. In some embodiments, a peptide comprises a neoepitope BTK sequence depicted in Tables 34 or 36. In some embodiments, a peptide comprises a neoepitope sequence comprising at least one mutant amino acid as depicted in Tables 34 or 36. In some embodiments, a peptide comprises a neoepitope sequence comprising at least 1, 2, 3, 4, 5, 6, 7, 8, 9, 10, 11, 12, 13, 14, 15, 16, 17, 18, 19, 20, 21, 22, 23, 24, 25, 26, 27, 28, 29, 30 or more mutant amino In some embodiments, a peptide comprises a neoepitope sequence comprising at least one mutant amino acid (underlined amino acid) and at least one bolded amino acid as depicted in Tables 1 or 2. In some embodiments, a peptide comprises a neoepitope sequence derived from a protein comprising at least one mutant amino acid (underlined amino acid) and at least 1, 2, 3, 4, 5, 6, 7, 8, 9, 10, 11, 12, 13, 14, 15, 16, 17, 18, 19, 20, 21, 22, 23, 24, 25, 26, 27, 28, 29, 30 or more non-mutant amino acids as depicted in Tables 1 or 2. In some embodiments, a peptide comprises a neoepitope sequence derived from a protein comprising at least one mutant amino acid (underlined amino acid) and at least 1, 2, 3, 4, 5, 6, 7, 8, 9, 10, 11, 12, 13, 14, 15, 16, 17, 18, 19, 20, 21, 22, 23, 24, 25, 26, 27, 28, 29, 30 or more non-mutant amino acids upstream of the least one mutant amino acid as depicted in Tables 1 or 2. In some embodiments, a peptide comprises a neoepitope sequence derived from a protein comprising at least one mutant amino acid (underlined amino acid) and at least 1, 2, 3, 4, 5, 6, 7, 8, 9, 10, 11, 12, 13, 14, 15, 16, 17, 18, 19, 20, 21, 22, 23, 24, 25, 26, 27, 28, 29, 30 or more non-mutant amino acids downstream of the least one mutant amino acid as depicted in Tables 1 or 2. In some embodiments, a peptide comprises a neoepitope sequence derived from a protein comprising at least one mutant amino acid (underlined amino acid), at least 1, 2, 3, 4, 5, 6, 7, 8, 9, 10, 11, 12, 13, 14, 15, 16, 17, 18, 19, 20, 21, 22, 23, 24, 25, 26, 27, 28, 29, 30 or more non-mutant amino acids upstream of the least one mutant amino acid, and at least 1, 2, 3, 4, 5, 6, 7, 8, 9, 10, 11, 12, 13, 14, 15, 16, 17, 18, 19, 20, 21, 22, 23, 24, 25, 26, 27, 28, 29, 30 or more non-mutant amino acids downstream of the least one mutant amino acid as depicted in Tables 1 or 2.

[0359] In some embodiments, a peptide comprises a neoepitope sequence derived from a protein comprising at least one mutant amino acid and at least 1, 2, 3, 4, 5, 6, 7, 8, 9, 10, 11, 12, 13, 14, 15, 16, 17, 18, 19, 20, 21, 22, 23, 24, 25, 26, 27, 28, 29, 30 or more non-mutant amino acids downstream of the least one mutant amino acid as depicted in Tables 34 or 36. In some embodiments, a peptide comprises a neoepitope sequence derived from a protein comprising at least one mutant amino acid, at least 1, 2, 3, 4, 5, 6, 7, 8, 9, 10, 11, 12, 13, 14, 15, 16, 17, 18, 19, 20, 21, 22, 23, 24, 25, 26, 27, 28, 29, 30 or more non-mutant amino acids upstream of the least one mutant amino acid, and at least 1, 2, 3, 4, 5, 6, 7, 8, 9, 10, 11, 12, 13, 14, 15, 16, 17, 18, 19, 20, 21, 22, 23, 24, 25, 26, 27, 28, 29, 30 or more non-mutant amino acids downstream of the least one mutant amino acid as depicted in Tables 34 or 36.

[0360] In some embodiments, a peptide comprises a neoantigenic peptide sequence depicted in Tables 40A-40D, 32, or 3A-3D. In some embodiments, a peptide comprises a neoepitope EGFR sequence depicted in Tables 40A-40D. In some embodiments, a peptide comprises a neoepitope sequence comprising at least one mutant amino acid as depicted in Tables 40A-40D. In some embodiments, a peptide comprises a neoepitope sequence comprising at least 1, 2, 3, 4, 5, 6, 7, 8, 9, 10, 11, 12, 13, 14, 15, 16, 17, 18, 19, 20, 21, 22, 23, 24, 25, 26, 27, 28, 29, 30 or more mutant amino acids (for example, an underlined amino acid in any one of Tables 40A-40D). In some embodiments, an EGFR peptide comprises a neoepitope sequence comprising at least one mutant amino acid depicted in bold letter as depicted in Tables 40D. In some embodiments, a peptide comprises a neoepitope sequence derived from a protein comprising at least one mutant amino acid (underlined amino acid) and at least 1, 2, 3, 4, 5, 6, 7, 8, 9, 10, 11, 12, 13, 14, 15, 16, 17, 18, 19, 20, 21, 22, 23, 24, 25, 26, 27, 28, 29, 30 or more non-mutant amino acids as depicted in Tables 40A-40D. In some embodiments, a peptide comprises a neoepitope sequence derived from a protein comprising at least one mutant amino acid (for example, underlined amino acid in Table 40C) and at least 1, 2, 3, 4, 5, 6, 7, 8, 9, 10, 11, 12, 13, 14, 15, 16, 17, 18, 19, 20, 21, 22, 23, 24, 25, 26, 27, 28, 29, 30 or more non-mutant amino acids upstream of the least one mutant amino acid as depicted in Tables 40A-40D. In some embodiments, a peptide comprises a neoepitope sequence derived from a protein comprising at least one mutant amino acid (underlined amino acid) and at least 1, 2, 3, 4, 5, 6, 7, 8, 9, 10, 11, 12, 13, 14, 15, 16, 17, 18, 19, 20, 21, 22, 23, 24, 25, 26, 27, 28, 29, 30 or more non-mutant amino acids downstream of the least one mutant amino acid as depicted in Tables 40A-40D. In some embodiments, a peptide comprises a neoepitope sequence derived from a protein comprising at least one mutant amino acid (underlined amino acid), at least 1, 2, 3, 4, 5, 6, 7, 8, 9, 10, 11, 12, 13, 14, 15, 16, 17, 18, 19, 20, 21, 22, 23, 24, 25, 26, 27, 28, 29, 30 or more non-mutant amino acids upstream of the least one mutant amino acid, and at least 1, 2, 3, 4, 5, 6, 7, 8, 9, 10, 11, 12, 13, 14, 15, 16, 17, 18, 19, 20, 21, 22, 23, 24, 25, 26, 27, 28, 29, 30 or more non-mutant amino acids downstream of the least one mutant amino acid as depicted in Tables 40A-40D.

[0361] In some embodiments, a peptide comprises a neoepitope sequence derived from a protein comprising at least one mutant amino acid and a sequence upstream of the least one mutant amino acid with at least 60%, 61%, 62%, 63%, 64%, 65%, 66%, 67%, 68%, 69%, 70%, 71%, 72%, 73%, 74%, 75%, 76%, 77%, 78%, 79%, 80%, 81%, 82%, 83%, 84%, 85%, 86%, 87%, 88%, 89%, 90%, 91%, 92%, 93%, 94%, 95%, 96%, 97%, 98%, 99% or 100% sequence identity to a corresponding wild type sequence. In some embodiments, a peptide comprises a neoepitope sequence derived from a protein comprising at least one mutant amino acid and a sequence downstream of the least one mutant amino acid with at least 60%, 61%, 62%, 63%, 64%, 65%, 66%, 67%, 68%, 69%, 70%, 71%, 72%, 73%, 74%, 75%, 76%, 77%, 78%, 79%, 80%, 81%, 82%, 83%, 84%, 85%, 86%, 87%, 88%, 89%, 90%, 91%, 92%, 93%, 94%, 95%, 96%, 97%, 98%, 99% or 100% sequence identity to a corresponding wild type sequence. In some embodiments, a peptide comprises a neoepitope sequence derived from a protein comprising at least one mutant amino acid, a sequence upstream of the least one mutant amino acid with at least 60%, 61%, 62%, 63%, 64%, 65%, 66%, 67%, 68%, 69%, 70%, 71%, 72%, 73%, 74%, 75%, 76%, 77%, 78%, 79%, 80%, 81%, 82%, 83%, 84%, 85%, 86%, 87%, 88%, 89%, 90%, 91%, 92%, 93%, 94%, 95%, 96%, 97%, 98%, 99% or 100% sequence identity to a corresponding wild type sequence, and a sequence downstream of the least one mutant amino acid with at least 60%, 61%, 62%, 63%, 64%, 65%, 66%, 67%, 68%, 69%, 70%, 71%, 72%, 73%, 74%, 75%, 76%, 77%, 78%, 79%, 80%, 81%, 82%, 83%, 84%, 85%, 86%, 87%, 88%, 89%, 90%, 91%, 92%, 93%, 94%, 95%, 96%, 97%, 98%, 99% or 100% sequence identity to a corresponding wild type sequence.

[0362] In some embodiments, a peptide comprises a neoepitope sequence derived from a protein comprising at least one mutant amino acid and a sequence upstream of the least one mutant amino acid comprising least 1, 2, 3, 4, 5, 6, 7, 8, 9, 10, 11, 12, 13, 14, 15, 16, 17, 18, 19, 20, 21, 22, 23, 24, 25, 26, 27, 28, 29, 30 or more contiguous amino acids with at least 60%, 61%, 62%, 63%, 64%, 65%, 66%, 67%, 68%, 69%, 70%, 71%, 72%, 73%, 74%, 75%, 76%, 77%, 78%, 79%, 80%, 81%, 82%, 83%, 84%, 85%, 86%, 87%, 88%, 89%, 90%, 91%, 92%, 93%, 94%, 95%, 96%, 97%, 98%, 99% or 100% sequence identity to a corresponding wild type sequence. In some embodiments, a peptide comprises a neoepitope sequence derived from a protein comprising at least one mutant amino acid and a sequence downstream of the least one mutant amino acid comprising least 1, 2, 3, 4, 5, 6, 7, 8, 9, 10, 11, 12, 13, 14, 15, 16, 17, 18, 19, 20, 21, 22, 23, 24, 25, 26, 27, 28, 29, 30 or more contiguous amino acids with at least 60%, 61%, 62%, 63%, 64%, 65%, 66%, 67%, 68%, 69%, 70%, 71%, 72%, 73%, 74%, 75%, 76%, 77%, 78%, 79%, 80%, 81%, 82%, 83%, 84%, 85%, 86%, 87%, 88%, 89%, 90%, 91%, 92%, 93%, 94%, 95%, 96%, 97%, 98%, 99% or 100% sequence identity to a corresponding wild type sequence. In some embodiments, a peptide comprises a neoepitope sequence derived from a protein comprising at least one mutant amino acid, a sequence upstream of the least one mutant amino acid comprising least 1, 2, 3, 4, 5, 6, 7, 8, 9, 10, 11, 12, 13, 14, 15, 16, 17, 18, 19, 20, 21, 22, 23, 24, 25, 26, 27, 28, 29, 30 or more contiguous amino acids with at least 60%, 61%, 62%, 63%, 64%, 65%, 66%, 67%, 68%, 69%, 70%, 71%, 72%, 73%, 74%, 75%, 76%, 77%, 78%, 79%, 80%, 81%, 82%, 83%, 84%, 85%, 86%, 87%, 88%, 89%, 90%, 91%, 92%, 93%, 94%, 95%, 96%, 97%, 98%, 99% or 100% sequence identity to a corresponding wild type sequence, and a sequence downstream of the least one mutant amino acid comprising least 1, 2, 3, 4, 5, 6, 7, 8, 9, 10, 11, 12, 13, 14, 15, 16, 17, 18, 19, 20, 21, 22, 23, 24, 25, 26, 27, 28, 29, 30 or more contiguous amino acids with at least 60%, 61%, 62%, 63%, 64%, 65%, 66%, 67%, 68%, 69%, 70%, 71%, 72%, 73%, 74%, 75%, 76%, 77%, 78%, 79%, 80%, 81%, 82%, 83%, 84%, 85%, 86%, 87%, 88%, 89%, 90%, 91%, 92%, 93%, 94%, 95%, 96%, 97%, 98%, 99% or 100% sequence identity to a corresponding wild type sequence.

[0363] In some embodiments, a peptide comprises a neoepitope sequence derived from a protein comprising at least one mutant amino acid (underlined amino acid) as depicted in Tables 1 or 2 and a sequence upstream of the least one mutant amino acid with at least 60%, 61%, 62%, 63%, 64%, 65%, 66%, 67%, 68%, 69%, 70%, 71%, 72%, 73%, 74%, 75%, 76%, 77%, 78%, 79%, 80%, 81%, 82%, 83%, 84%, 85%, 86%, 87%, 88%, 89%, 90%, 91%, 92%, 93%, 94%, 95%, 96%, 97%, 98%, 99% or 100% sequence identity to a corresponding wild type sequence. In some embodiments, a peptide comprises a neoepitope sequence derived from a protein comprising at least one mutant amino acid (underlined amino acid) as depicted in Tables 1 or 2 and a sequence downstream of the least one mutant amino acid with at least 60%, 61%, 62%, 63%, 64%, 65%, 66%, 67%, 68%, 69%, 70%, 71%, 72%, 73%, 74%, 75%, 76%, 77%, 78%, 79%, 80%, 81%, 82%, 83%, 84%, 85%, 86%, 87%, 88%, 89%, 90%, 91%, 92%, 93%, 94%, 95%, 96%, 97%, 98%, 99% or 100% sequence identity to a corresponding wild type sequence. In some embodiments, a peptide comprises a neoepitope sequence derived from a protein comprising at least one mutant amino acid (underlined amino acid) as depicted in Tables 1 or 2, a sequence upstream of the least one mutant amino acid with at least 60%, 61%, 62%, 63%, 64%, 65%, 66%, 67%, 68%, 69%, 70%, 71%, 72%, 73%, 74%, 75%, 76%, 77%, 78%, 79%, 80%, 81%, 82%, 83%, 84%, 85%, 86%, 87%, 88%, 89%, 90%, 91%, 92%, 93%, 94%, 95%, 96%, 97%, 98%, 99% or 100% sequence identity to a corresponding wild type sequence, and a sequence downstream of the least one mutant amino acid with at least 60%, 61%, 62%, 63%, 64%, 65%, 66%, 67%, 68%, 69%, 70%, 71%, 72%, 73%, 74%, 75%, 76%, 77%, 78%, 79%, 80%, 81%, 82%, 83%, 84%, 85%, 86%, 87%, 88%, 89%, 90%, 91%, 92%, 93%, 94%, 95%, 96%, 97%, 98%, 99% or 100% sequence identity to a corresponding wild type sequence.

[0364] In some embodiments, a peptide comprises a neoepitope sequence derived from a protein comprising at least one mutant amino acid (underlined amino acid) as depicted in Tables 1 or 2 and a sequence upstream of the least one mutant amino acid comprising least 1, 2, 3, 4, 5, 6, 7, 8, 9, 10, 11, 12, 13, 14, 15, 16, 17, 18, 19, 20, 21, 22, 23, 24, 25, 26, 27, 28, 29, 30 or more contiguous amino acids with at least 60%, 61%, 62%, 63%, 64%, 65%, 66%, 67%, 68%, 69%, 70%, 71%, 72%, 73%, 74%, 75%, 76%, 77%, 78%, 79%, 80%, 81%, 82%, 83%, 84%, 85%, 86%, 87%, 88%, 89% 90%, 91%, 92%, 93%, 94%, 95%, 96%, 97%, 98%, 99% or 100% sequence identity to a corresponding wild type sequence. In some embodiments, a peptide comprises a neoepitope sequence derived from a protein comprising at least one mutant amino acid (underlined amino acid) as depicted in Tables 1 or 2 and a sequence downstream of the least one mutant amino acid comprising least 1, 2, 3, 4, 5, 6, 7, 8, 9, 10, 11, 12, 13, 14, 15, 16, 17, 18, 19, 20, 21, 22, 23, 24, 25, 26, 27, 28, 29, 30 or more contiguous amino acids with at least 60%, 61%, 62%, 63%, 64%, 65%, 66%, 67%, 68%, 69%, 70%, 71%, 72%, 73%, 74%, 75%, 76%, 77%, 78%, 79%, 80%, 81%, 82%, 83%, 84%, 85%, 86%, 87%, 88%, 89%, 90%, 91%, 92%, 93%, 94%, 95%, 96%, 97%, 98%, 99% or 100% sequence identity to a corresponding wild type sequence. In some embodiments, a peptide comprises a neoepitope sequence derived from a protein comprising at least one mutant amino acid (underlined amino acid) as depicted in Tables 1 or 2, a sequence upstream of the least one mutant amino acid comprising least 1, 2, 3, 4, 5, 6, 7, 8, 9, 10, 11, 12, 13, 14, 15, 16, 17, 18, 19, 20, 21, 22, 23, 24, 25, 26, 27, 28, 29, 30 or more contiguous amino acids with at least 60%, 61%, 62%, 63%, 64%, 65%, 66%, 67%, 68%, 69%, 70%, 71%, 72%, 73%, 74%, 75%, 76%, 77%, 78%, 79%, 80%, 81%, 82%, 83%, 84%, 85%, 86%, 87%, 88%, 89%, 90%, 91%, 92%, 93%, 94%, 95%, 96%, 97%, 98%, 99% or 100% sequence identity to a corresponding wild type sequence, and a sequence downstream of the least one mutant amino acid comprising least 1, 2, 3, 4, 5, 6, 7, 8, 9, 10, 11, 12, 13, 14, 15, 16, 17, 18, 19, 20, 21, 22, 23, 24, 25, 26, 27, 28, 29, 30 or more contiguous amino acids with at least 60%, 61%, 62%, 63%, 64%, 65%, 66%, 67%, 68%, 69%, 70%, 71%, 72%, 73%, 74%, 75%, 76%, 77%, 78%, 79%, 80%, 81%, 82%, 83%, 84%, 85%, 86%, 87%, 88%, 89%, 90%, 91%, 92%, 93%, 94%, 95%, 96%, 97%, 98%, 99% or 100% sequence identity to a corresponding wild type sequence.

[0365] In some embodiments, an BTK peptide comprises a neoepitope sequence derived from a protein comprising at least one mutant amino acid (underlined amino acid) as depicted in Tables 34 or 36 and a sequence upstream of the least one mutant amino acid with at least 60%, 61%, 62%, 63%, 64%, 65%, 66%, 67%, 68%, 69%, 70%, 71%, 72%, 73%, 74%, 75%, 76%, 77%, 78%, 79%, 80%, 81%, 82%, 83%, 84%, 85%, 86%, 87%, 88%, 89%, 90%, 91%, 92%, 93%, 94%, 95%, 96%, 97%, 98%, 99% or 100% sequence identity to a corresponding wild type sequence. In some embodiments, a peptide comprises a neoepitope sequence derived from a protein comprising at least one mutant amino acid as depicted in Tables 34 or 36 and a sequence downstream of the least one mutant amino acid with at least 60%, 61%, 62%, 63%, 64%, 65%, 66%, 67%, 68%, 69%, 70%, 71%, 72%, 73%, 74%, 75%, 76%, 77%, 78%, 79%, 80%, 81%, 82%, 83%, 84%, 85%, 86%, 87%, 88%, 89%, 90%, 91%, 92%, 93%, 94%, 95%, 96%, 97%, 98%, 99% or 100% sequence identity to a corresponding wild type sequence. In some embodiments, a peptide comprises a neoepitope sequence derived from a protein comprising at least one mutant amino acid as depicted in Tables 34 or 36, a sequence upstream of the least one mutant amino acid with at least 60%, 61%, 62%, 63%, 64%, 65%, 66%, 67%, 68%, 69%, 70%, 71%, 72%, 73%, 74%, 75%, 76%, 77%, 78%, 79%, 80%, 81%, 82%, 83%, 84%, 85%, 86%, 87%, 88%, 89%, 90%, 91%, 92%, 93%, 94%, 95%, 96%, 97%, 98%, 99% or 100% sequence identity to a corresponding wild type sequence, and a sequence downstream of the least one mutant amino acid with at least 60%, 61%, 62%, 63%, 64%, 65%, 66%, 67%, 68%, 69%, 70%, 71%, 72%, 73%, 74%, 75%, 76%, 77%, 78%, 79%, 80%, 81%, 82%, 83%, 84%, 85%, 86%, 87%, 88%, 89%, 90%, 91%, 92%, 93%, 94%, 95%, 96%, 97%, 98%, 99% or 100% sequence identity to a corresponding wild type sequence.

[0366] In some embodiments, a peptide comprises a neoepitope sequence derived from a protein comprising at least one mutant amino acid (underlined amino acid) as depicted in Tables 34 or 36, and a sequence upstream of the least one mutant amino acid comprising least 1, 2, 3, 4, 5, 6, 7, 8, 9, 10, 11, 12, 13, 14, 15, 16, 17, 18, 19, 20, 21, 22, 23, 24, 25, 26, 27, 28, 29, 30 or more contiguous amino acids with at least 60%, 61%, 62%, 63%, 64%, 65%, 66%, 67%, 68%, 69%, 70%, 71%, 72%, 73%, 74%, 75%, 76%, 77%, 78%, 79%, 80%, 81%, 82%, 83%, 84%, 85%, 86%, 87%, 88%, 89%, 90%, 91%, 92%, 93%, 94%, 95%, 96%, 97%, 98%, 99% or 100% sequence identity to a corresponding wild type sequence. In some embodiments, a peptide comprises a neoepitope sequence derived from a protein comprising at least one mutant amino acid as depicted in Table 34 or 36 and a sequence downstream of the least one mutant amino acid comprising least 1, 2, 3, 4, 5, 6, 7, 8, 9, 10, 11, 12, 13, 14, 15, 16, 17, 18, 19, 20, 21, 22, 23, 24, 25, 26, 27, 28, 29, 30 or more contiguous amino acids with at least 60%, 61%, 62%, 63%, 64%, 65%, 66%, 67%, 68%, 69%, 70%, 71%, 72%, 73%, 74%, 75%, 76%, 77%, 78%, 79%, 80%, 81%, 82%, 83%, 84%, 85%, 86%, 87%, 88%, 89%, 90%, 91%, 92%, 93%, 94%, 95%, 96%, 97%, 98%, 99% or 100% sequence identity to a corresponding wild type sequence. In some embodiments, a peptide comprises a neoepitope sequence derived from a protein comprising at least one mutant amino acid (underlined amino acid) as depicted in Table 34 or 36, a sequence upstream of the least one mutant amino acid comprising least 1, 2, 3, 4, 5, 6, 7, 8, 9, 10, 11, 12, 13, 14, 15, 16, 17, 18, 19, 20, 21, 22, 23, 24, 25, 26, 27, 28, 29, 30 or more contiguous amino acids with at least 60%, 61%, 62%, 63%, 64%, 65%, 66%, 67%, 68%, 69%, 70%, 71%, 72%, 73%, 74%, 75%, 76%, 77%, 78%, 79%, 80%, 81%, 82%, 83%, 84%, 85%, 86%, 87%, 88%, 89%, 90%, 91%, 92%, 93%, 94%, 95%, 96%, 97%, 98%, 99% or 100% sequence identity to a corresponding wild type sequence, and a sequence downstream of the least one mutant amino acid comprising least 1, 2, 3, 4, 5, 6, 7, 8, 9, 10, 11, 12, 13, 14, 15, 16, 17, 18, 19, 20, 21, 22, 23, 24, 25, 26, 27, 28, 29, 30 or more contiguous amino acids with at least 60%, 61%, 62%, 63%, 64%, 65%, 66%, 67%, 68%, 69%, 70%, 71%, 72%, 73%, 74%, 75%, 76%, 77%, 78%, 79%, 80%, 81%, 82%, 83%, 84%, 85%, 86%, 87%, 88%, 89%, 90%, 91%, 92%, 93%, 94%, 95%, 96%, 97%, 98%, 99% or 100% sequence identity to a corresponding wild type sequence.

[0367] Exemplary neoantigenic peptides corresponding to the C481S mutation are presented in Table 34. The table also provides a list of HLA alleles, the encoded protein products of which can bind to the peptides. In some embodiments, a peptide comprising a C481S mutation is: MIKEGSMSEDEFIEEAKVMMNLSHEKLVQLYGVCTKQRPIFIITEYMANGSLLNYLREMRHRFQTQQ LLEMCKDVCEAMEYLESKQFLHRDLAARNCLVND. In some embodiments, a peptide comprising a BTK mutation comprises a neoepitope sequence of ANGSLLNY. In some embodiments, a peptide comprising a C481S BTK mutation comprises a neoepitope sequence of ANGSLLNYL. In some embodiments, a peptide comprising a C481S BTK mutation comprises a neoepitope sequence of ANGSLLNYLR. In some embodiments, a peptide comprising a C481S BTK mutation comprises a neoepitope sequence of EYMANGSL. In some embodiments, a peptide comprising a C481S BTK mutation comprises a neoepitope sequence of EYMANGSLLN. In some embodiments, a peptide comprising a C481S BTK mutation comprises a neoepitope sequence of EYMANGSLLNY. In some embodiments, a peptide comprising a C481S BTK mutation comprises a neoepitope sequence of GSLLNYLR. In some embodiments, a peptide comprising a C481S BTK mutation comprises a neoepitope sequence of GSLLNYLREM. In some embodiments, a peptide comprising a C481S BTK mutation comprises a neoepitope sequence of ITEYMANGS. In some embodiments, a peptide comprising a C481S BTK mutation comprises a neoepitope sequence of ITEYMANGSL. In some embodiments, a peptide comprising a C481S BTK mutation comprises a neoepitope sequence of ITEYMANGSLL. MANGSLLNYL. In some embodiments, a peptide comprising a C481S BTK mutation comprises a neoepitope sequence of MANGSLLNYLR. In some embodiments, a peptide comprising a C481S BTK mutation comprises a neoepitope sequence of NGSLLNYL. In some embodiments, a peptide comprising a C481S BTK mutation comprises a neoepitope sequence of NGSLLNYL. In some embodiments, a peptide comprising a C481S BTK mutation comprises a neoepitope sequence of SLLNYLREMR. In some embodiments, a peptide comprising a C481S BTK mutation comprises a neoepitope sequence of TEYMANGSLL; TEYMANGSLLNY. In some embodiments, a peptide comprising a C481S BTK mutation comprises a neoepitope sequence of YMANGSLL.

[0368] In some embodiments, an EGFR peptide comprises a neoepitope sequence derived from a protein comprising at least one mutant amino acid (underlined amino acid) as depicted in Tables 40A-40D and a sequence upstream of the least one mutant amino acid with at least 60%, 61%, 62%, 63%, 64%, 65%, 66%, 67%, 68%, 69%, 70%, 71%, 72%, 73%, 74%, 75%, 76%, 77%, 78%, 79%, 80%, 81%, 82%, 83%, 84%, 85%, 86%, 87%, 88%, 89%, 90%, 91%, 92%, 93%, 94%, 95%, 96%, 97%, 98%, 99% or 100% sequence identity to a corresponding wild type sequence. In some embodiments, a peptide comprises a neoepitope sequence derived from a protein comprising at least one mutant amino acid (underlined amino acid) as depicted in Tables 40A-40D and a sequence downstream of the least one mutant amino acid with at least 60%, 61%, 62%, 63%, 64%, 65%, 66%, 67%, 68%, 69%, 70%, 71%, 72%, 73%, 74%, 75%, 76%, 77%, 78%, 79%, 80%, 81%, 82%, 83%, 84%, 85%, 86%, 87%, 88%, 89%, 90%, 91%, 92%, 93%, 94%, 95%, 96%, 97%, 98%, 99% or 100% sequence identity to a corresponding wild type sequence. In some embodiments, a peptide comprises a neoepitope sequence derived from a protein comprising at least one mutant amino acid as depicted in Tables 40A-40D, a sequence upstream of the least one mutant amino acid with at least 60%, 61%, 62%, 63%, 64%, 65%, 66%, 67%, 68%, 69%, 70%, 71%, 72%, 73%, 74%, 75%, 76%, 77%, 78%, 79%, 80%, 81%, 82%, 83%, 84%, 85%, 86%, 87%, 88%, 89%, 90%, 91%, 92%, 93%, 94%, 95%, 96%, 97%, 98%, 99% or 100% sequence identity to a corresponding wild type sequence, and a sequence downstream of the least one mutant amino acid with at least 60%, 61%, 62%, 63%, 64%, 65%, 66%, 67%, 68%, 69%, 70%, 71%, 72%, 73%, 74%, 75%, 76%, 77%, 78%, 79%, 80%, 81%, 82%, 83%, 84%, 85%, 86%, 87%, 88%, 89%, 90%, 91%, 92%, 93%, 94%, 95%, 96%, 97%, 98%, 99% or 100% sequence identity to a corresponding wild type sequence.

[0369] In some embodiments, a peptide comprises a neoepitope sequence derived from a protein comprising at least one mutant amino acid (underlined amino acid) as depicted in Tables 40A-40D and a sequence upstream of the least one mutant amino acid comprising least 1, 2, 3, 4, 5, 6, 7, 8, 9, 10, 11, 12, 13, 14, 15, 16, 17, 18, 19, 20, 21, 22, 23, 24, 25, 26, 27, 28, 29, 30 or more contiguous amino acids with at least 60%, 61%, 62%, 63%, 64%, 65%, 66%, 67%, 68%, 69%, 70%, 71%, 72%, 73%, 74%, 75%, 76%, 77%, 78%, 79%, 80%, 81%, 82%, 83%, 84%, 85%, 86%, 87%, 88%, 89%, 90%, 91%, 92%, 93%, 94%, 95%, 96%, 97%, 98%, 99% or 100% sequence identity to a corresponding wild type sequence. In some embodiments, a peptide comprises a neoepitope sequence derived from a protein comprising at least one mutant amino acid (underlined amino acid) as depicted in Tables 40A-40D and a sequence downstream of the least one mutant amino acid comprising least 1, 2, 3, 4, 5, 6, 7, 8, 9, 10, 11, 12, 13, 14, 15, 16, 17, 18, 19, 20, 21, 22, 23, 24, 25, 26, 27, 28, 29, 30 or more contiguous amino acids with at least 60%, 61%, 62%, 63%, 64%, 65%, 66%, 67%, 68%, 69%, 70%, 71%, 72%, 73%, 74%, 75%, 76%, 77%, 78%, 79%, 80%, 81%, 82%, 83%, 84%, 85%, 86%, 87%, 88%, 89%, 90%, 91%, 92%, 93%, 94%, 95%, 96%, 97%, 98%, 99% or 100% sequence identity to a corresponding wild type sequence. In some embodiments, a peptide comprises a neoepitope sequence derived from a protein comprising at least one mutant amino acid (underlined amino acid) as depicted in Tables 40A-40D, a sequence upstream of the least one mutant amino acid comprising least 1, 2, 3, 4, 5, 6, 7, 8, 9, 10, 11, 12, 13, 14, 15, 16, 17, 18, 19, 20, 21, 22, 23, 24, 25, 26, 27, 28, 29, 30 or more contiguous amino acids with at least 60%, 61%, 62%, 63%, 64%, 65%, 66%, 67%, 68%, 69%, 70%, 71%, 72%, 73%, 74%, 75%, 76%, 77%, 78%, 79%, 80%, 81%, 82%, 83%, 84%, 85%, 86%, 87%, 88%, 89%, 90%, 91%, 92%, 93%, 94%, 95%, 96%, 97%, 98%, 99% or 100% sequence identity to a corresponding wild type sequence, and a sequence downstream of the least one mutant amino acid comprising least 1, 2, 3, 4, 5, 6, 7, 8, 9, 10, 11, 12, 13, 14, 15, 16, 17, 18, 19, 20, 21, 22, 23, 24, 25, 26, 27, 28, 29, 30 or more contiguous amino acids with at least 60%, 61%, 62%, 63%, 64%, 65%, 66%, 67%, 68%, 69%, 70%, 71%, 72%, 73%, 74%, 75%, 76%, 77%, 78%, 79%, 80%, 81%, 82%, 83%, 84%, 85%, 86%, 87%, 88%, 89%, 90%, 91%, 92%, 93%, 94%, 95%, 96%, 97%, 98%, 99% or 100% sequence identity to a corresponding wild type sequence.

[0370] In some embodiments, a peptide comprising an EGFR T790M mutation comprises a sequence of GICLTSTVQLIMQLMPFGCLLDY. In some embodiments, a peptide comprising an EGFR T790M mutation comprises a neoepitope sequence of VQLIMQLMPF. In some embodiments, a peptide comprising an EGFR T790M mutation comprises a neoepitope sequence of STVQLIMQLM. In some embodiments, a mutant EGFR peptide comprising an EGFR T790M mutation comprises a neoepitope sequence of QLIMQLMPF. In some embodiments, a peptide comprising an EGFR T790M mutation comprises a neoepitope sequence of MQLMPFGCLL. In some embodiments, a peptide comprising an EGFR T790M mutation comprises a neoepitope sequence of LIMQLMPF. In some embodiments, a peptide comprising an EGFR T790M mutation comprises a neoepitope sequence of LTSTVQLIM. In some embodiments, a peptide comprising an EGFR T790M mutation comprises a neoepitope sequence of STVQLIMQL. In some embodiments, a peptide comprising an EGFR T790M mutation comprises a neoepitope sequence of TSTVQLIMQL. In some embodiments, a peptide comprising an EGFR T790M mutation comprises a neoepitope sequence of TVQLIMQL. In some embodiments, a peptide comprising an EGFR T790M mutation comprises a neoepitope sequence of TVQLIMQLM. In some embodiments, a peptide comprising an EGFR T790M mutation comprises a neoepitope sequence of VQLIMQLM. In some embodiments, a peptide comprising an EGFR T790M mutation comprises a neoepitope sequence of CLTSTVQLIM. In some embodiments, a peptide comprising an EGFR T790M mutation comprises a neoepitope sequence of IMQLMPFGC. In some embodiments, a peptide comprising an EGFR T790M mutation comprises a neoepitope sequence of IMQLMPFGC. In some embodiments, a peptide comprising an EGFR T790M mutation comprises a neoepitope sequence of IMQLMPFGCL. In some embodiments, a peptide comprising an EGFR T790M mutation comprises a neoepitope sequence of LIMQLMPFG. In some embodiments, a peptide comprising an EGFR T790M mutation comprises a neoepitope sequence of LIMQLMPFGC. In some embodiments, a peptide comprising an EGFR T790M mutation comprises a neoepitope sequence of QLIMQLMPFG.

[0371] In some embodiments, a peptide comprising an EGFR, S492R mutation comprises a sequence of SLNITSLGLRSLKEISDGDVIISGNKNLCYANTINWKKLFGTSGQKTKIIRNRGENSCKATGQVCHALC SPEGCWGPEPRDCVSCRNVSRGRECVDKCNLL. In some embodiments, a peptide comprising an EGFR S492R mutation comprises a neoepitope sequence of IIRNRGENSCK.

[0372] In some embodiments, an EGFR neopeptide is selected from Table 40A-40D.

[0373] In some embodiments, a peptide comprising a deletion mutation in EGFR, such as deletion of G in EGFRvIII (internal deletion), MRPSGTAGAALLALLAALCPASRALEEKK:G:NYVVTDHGSCVRACGADSYEMEEDGVRKCKKCEG PCRKVCNGIGIGEFKD, comprises a neoepitope sequence of ALEEKKGNYV.

[0374] In some embodiments, a peptide comprising a mutation depicted in the sequence: LPQPPICTIDVYMIMVKCWMIDADSRPKFRELIIEFSKMARDPQRYLVIQ::LQDKFEHLKMIQQEEIR KLEEEKKQLEGEIIDFYKMKAASEALQTQLSTD, comprises a neoepitope sequence of IQLQDKFEHL. In some embodiments, a peptide comprising a mutation depicted in the sequence: LPQPPICTIDVYMIMVKCWMIDADSRPKFRELIIEFSKMARDPQRYLVIQ::LQDKFEHLKMIQQEEIR KLEEEKKQLEGEIIDFYKMKAASEALQTQLSTD, comprises a neoepitope sequence of QLQDKFEHL. In some embodiments, a peptide comprising a mutation depicted in the sequence: LPQPPICTIDVYMIMVKCWMIDADSRPKFRELIIEFSKMARDPQRYLVIQ::LQDKFEHLKMIQQEEIR KLEEEKKQLEGEIIDFYKMKAASEALQTQLSTD, comprises a neoepitope sequence of QLQDKFEHLK. In some embodiments, a peptide comprising a mutation depicted in the sequence: LPQPPICTIDVYMIMVKCWMIDADSRPKFRELIIEFSKMARDPQRYLVIQ::LQDKFEHLKMIQQEEIR KLEEEKKQLEGEIIDFYKMKAASEALQTQLSTD, comprises a neoepitope sequence of

### Peptide Modification

[0375] In some embodiments, the present disclosure includes modified peptides. A modification can include a covalent chemical modification that does not alter the primary amino acid sequence of the antigenic peptide itself. Modifications can produce peptides with desired properties, for example, prolonging the in vivo half-life, increasing the stability, reducing the clearance, altering the immunogenicity or allergenicity, enabling the raising of particular antibodies, cellular targeting, antigen uptake, antigen processing, HLA affinity, HLA stability or antigen presentation. In some embodiments, a peptide may comprise one or more sequences that enhance processing and presentation of epitopes by APCs, for example, for generation of an immune response.

[0376] In some embodiments, the peptide may be modified to provide desired attributes. For instance, the ability of the peptides to induce CTL activity can be enhanced by linkage to a sequence which contains at least one epitope that is capable of inducing a T helper cell response. In some embodiments, immunogenic peptides/T helper conjugates are linked by a spacer molecule. In some embodiments, a spacer comprises relatively small, neutral molecules, such as amino acids or amino acid mimetics, which are substantially uncharged under physiological conditions. Spacers can be selected from, e.g., Ala, Gly, or other neutral spacers of nonpolar amino acids or neutral polar amino acids. It will be understood that the optionally present spacer need not be comprised of the same residues and thus may be a hetero- or homo-oligomer. The neoantigenic peptide may be linked to the T helper peptide either directly or via a spacer either at the amino or carboxy terminus of the peptide. The amino terminus of either the neoantigenic peptide or the T helper peptide may be acylated. Examples of T helper peptides include tetanus toxoid residues 830-843, influenza residues 307-319, and malaria circumsporozoite residues 382-398 and residues 378-389.

[0377] The peptide sequences of the present disclosure may optionally be altered through changes at the DNA level, particularly by mutating the DNA encoding the peptide at preselected bases such that codons are generated that will translate into the desired amino acids.

[0378] In some embodiments, the peptide described herein can contain substitutions to modify a physical property (e.g., stability or solubility) of the resulting peptide. For example, the peptides can be modified by the substitution of a cysteine (C) with α-amino butyric acid (“B”). Due to its chemical nature, cysteine has the propensity to form disulfide bridges and sufficiently alter the peptide structurally so as to reduce binding capacity. Substituting α-amino butyric acid for C not only alleviates this problem, but actually improves binding and cross-binding capability in certain instances. Substitution of cysteine with α-amino butyric acid can occur at any residue of a neoantigenic peptide, e.g., at either anchor or non-anchor positions of an epitope or analog within a peptide, or at other positions of a peptide.

[0379] The peptide may also be modified by extending or decreasing the compound's amino acid sequence, e.g., by the addition or deletion of amino acids. The peptides or analogs can also be modified by altering the order or composition of certain residues. It will be appreciated by the skilled artisan that certain amino acid residues essential for biological activity, e.g., those at critical contact sites or conserved residues, may generally not be altered without an adverse effect on biological activity. The non-critical amino acids need not be limited to those naturally occurring in proteins, such as L-α-amino acids, but may include non-natural amino acids as well, such as D-isomers, β-γ-δ-amino acids, as well as many derivatives of L-α-amino acids.

[0380] In some embodiments, the peptide may be modified using a series of peptides with single amino acid substitutions to determine the effect of electrostatic charge, hydrophobicity, etc. on HLA binding. For instance, a series of positively charged (e.g., Lys or Arg) or negatively charged (e.g., Glu) amino acid substitutions may be made along the length of the peptide revealing different patterns of sensitivity towards various HLA molecules and T cell receptors. In addition, multiple substitutions using small, relatively neutral moieties such as Ala, Gly, Pro, or similar residues may be employed. The substitutions may be homo-oligomers or hetero-oligomers. The number and types of residues which are substituted or added depend on the spacing necessary between essential contact points and certain functional attributes which are sought (e.g., hydrophobicity versus hydrophilicity). Increased binding affinity for an HLA molecule or T cell receptor may also be achieved by such substitutions, compared to the affinity of the parent peptide. In any event, such substitutions should employ amino acid residues or other molecular fragments chosen to avoid, for example, steric and charge interference which might disrupt binding. Amino acid substitutions are typically of single residues. Substitutions, deletions, insertions or any combination thereof may be combined to arrive at a final peptide.

[0381] In some embodiments, the peptide described herein can comprise amino acid mimetics or unnatural amino acid residues, e.g. D- or L-naphylalanine; D- or L-phenylglycine; D- or L-2-thieneylalanine; D- or L-1, -2, 3-, or 4-pyreneylalanine; D- or L-3 thieneylalanine; D- or L-(2-pyridinyl)-alanine; D- or L-(3-pyridinyl)-alanine; D- or L-(2-pyrazinyl)-alanine; D- or L-(4-isopropyl)-phenylglycine; D-(trifluoromethyl)-phenylglycine; D-(trifluoro-methyl)-phenylalanine; D-ρ-fluorophenylalanine; D- or L-ρ-biphenyl-phenylalanine; D- or L-ρ-methoxybiphenylphenylalanine; D- or L-2-indole(allyl)alanines; and, D- or L-alkylalanines, where the alkyl group can be a substituted or unsubstituted methyl, ethyl, propyl, hexyl, butyl, pentyl, isopropyl, iso-butyl, sec-isotyl, iso-pentyl, or a non-acidic amino acid residues. Aromatic rings of a non-natural amino acid include, e.g., thiazolyl, thiophenyl, pyrazolyl, benzimidazolyl, naphthyl, furanyl, pyrrolyl, and pyridyl aromatic rings. Modified peptides that have various amino acid mimetics or unnatural amino acid residues may have increased stability in vivo. Such peptides may also have improved shelf-life or manufacturing properties.

[0382] In some embodiments, a peptide described herein can be modified by terminal-NH₂ acylation, e.g., by alkanoyl (C₁-C₂₀) or thioglycolyl acetylation, terminal-carboxyl amidation, e.g., ammonia, methylamine, etc. In some embodiments these modifications can provide sites for linking to a support or other molecule. In some embodiments, the peptide described herein can contain modifications such as but not limited to glycosylation, side chain oxidation, biotinylation, phosphorylation, addition of a surface active material, e.g. a lipid, or can be chemically modified, e.g., acetylation, etc. Moreover, bonds in the peptide can be other than peptide bonds, e.g., covalent bonds, ester or ether bonds, disulfide bonds, hydrogen bonds, ionic bonds, etc.

[0383] In some embodiments, a peptide described herein can comprise carriers such as those well known in the art, e.g., thyroglobulin, albumins such as human serum albumin, tetanus toxoid, polyamino acid residues such as poly L-lysine and poly L-glutamic acid, influenza virus proteins, hepatitis B virus core protein, and the like.

[0384] The peptides can be further modified to contain additional chemical moieties not normally part of a protein. Those derivatized moieties can improve the solubility, the biological half-life, absorption of the protein, or binding affinity. The moieties can also reduce or eliminate any desirable side effects of the peptides and the like. An overview for those moieties can be found in Remington's Pharmaceutical Sciences, 20th ed., Mack Publishing Co., Easton, Pa. (2000). For example, neoantigenic peptides having the desired activity may be modified as necessary to provide certain desired attributes, e.g. improved pharmacological characteristics, while increasing or at least retaining substantially all of the biological activity of the unmodified peptide to bind the desired HLA molecule and activate the appropriate T cell. For instance, the peptide may be subject to various changes, such as substitutions, either conservative or non-conservative, where such changes might provide for certain advantages in their use, such as improved HLA binding. Such conservative substitutions may encompass replacing an amino acid residue with another amino acid residue that is biologically and/or chemically similar, e.g., one hydrophobic residue for another, or one polar residue for another. The effect of single amino acid substitutions may also be probed using D-amino acids. Such modifications may be made using well known peptide synthesis procedures, as described in e.g., Merrifield, Science 232:341-347 (1986), Barany & Merrifield, The Peptides, Gross & Meienhofer, eds. (N.Y., Academic Press), pp. 1-284 (1979); and Stewart & Young, Solid Phase Peptide Synthesis, (Rockford, III., Pierce), 2d Ed. (1984).

[0385] In some embodiments, the peptide described herein may be conjugated to large, slowly metabolized macromolecules such as proteins; polysaccharides, such as sepharose, agarose, cellulose, cellulose beads; polymeric amino acids such as polyglutamic acid, polylysine; amino acid copolymers; inactivated virus particles; inactivated bacterial toxins such as toxoid from diphtheria, tetanus, cholera, leukotoxin molecules; inactivated bacteria; and dendritic cells.

[0386] Changes to the peptide that may include, but are not limited to, conjugation to a carrier protein, conjugation to a ligand, conjugation to an antibody, PEGylation, polysialylation HESylation, recombinant PEG mimetics, Fc fusion, albumin fusion, nanoparticle attachment, nanoparticulate encapsulation, cholesterol fusion, iron fusion, acylation, amidation, glycosylation, side chain oxidation, phosphorylation, biotinylation, the addition of a surface active material, the addition of amino acid mimetics, or the addition of unnatural amino acids.

[0387] Glycosylation can affect the physical properties of proteins and can also be important in protein stability, secretion, and subcellular localization. Proper glycosylation can be important for biological activity. In fact, some genes from eukaryotic organisms, when expressed in bacteria (e.g., E. coli) which lack cellular processes for glycosylating proteins, yield proteins that are recovered with little or no activity by virtue of their lack of glycosylation. Addition of glycosylation sites can be accomplished by altering the amino acid sequence. The alteration to the peptide or protein may be made, for example, by the addition of, or substitution by, one or more serine or threonine residues (for O-linked glycosylation sites) or asparagine residues (for N-linked glycosylation sites). The structures of N-linked and O-linked oligosaccharides and the sugar residues found in each type may be different. One type of sugar that is commonly found on both is N-acetylneuraminic acid (hereafter referred to as sialic acid). Sialic acid is usually the terminal residue of both N-linked and O-linked oligosaccharides and, by virtue of its negative charge, may confer acidic properties to the glycoprotein. Embodiments of the present disclosure comprise the generation and use of N-glycosylation variants. Removal of carbohydrates may be accomplished chemically or enzymatically, or by substitution of codons encoding amino acid residues that are glycosylated. Chemical deglycosylation techniques are known, and enzymatic cleavage of carbohydrate moieties on polypeptides can be achieved by the use of a variety of endo- and exo-glycosidases.

[0388] Additional suitable components and molecules for conjugation include, for example, molecules for targeting to the lymphatic system, thyroglobulin; albumins such as human serum albumin (HAS); tetanus toxoid; Diphtheria toxoid; polyamino acids such as poly(D-lysine:D-glutamic acid); VP6 polypeptides of rotaviruses; influenza virus hemagglutinin, influenza virus nucleoprotein; Keyhole Limpet Hemocyanin (KLH); and hepatitis B virus core protein and surface antigen; or any combination of the foregoing.

[0389] Another type of modification is to conjugate (e.g., link) one or more additional components or molecules at the N- and/or C-terminus of a polypeptide sequence, such as another protein (e.g., a protein having an amino acid sequence heterologous to the subject protein), or a carrier molecule. Thus, an exemplary polypeptide sequence can be provided as a conjugate with another component or molecule. In some embodiments, fusion of albumin to the peptide or protein of the present disclosure can, for example, be achieved by genetic manipulation, such that the DNA coding for HSA, or a fragment thereof, is joined to the DNA coding for the one or more polypeptide sequences. Thereafter, a suitable host can be transformed or transfected with the fused nucleotide sequences in the form of, for example, a suitable plasmid, so as to express a fusion polypeptide. The expression may be effected in vitro from, for example, prokaryotic or eukaryotic cells, or in vivo from, for example, a transgenic organism. In some embodiments of the present disclosure, the expression of the fusion protein is performed in mammalian cell lines, for example, CHO cell lines. Furthermore, albumin itself may be modified to extend its circulating half-life. Fusion of the modified albumin to one or more polypeptides can be attained by the genetic manipulation techniques described above or by chemical conjugation; the resulting fusion molecule has a half-life that exceeds that of fusions with non-modified albumin (see, e.g., WO2011/051489). Several albumin-binding strategies have been developed as alternatives for direct fusion, including albumin binding through a conjugated fatty acid chain (acylation). Because serum albumin is a transport protein for fatty acids, these natural ligands with albumin-binding activity have been used for half-life extension of small protein therapeutics.

[0390] Additional candidate components and molecules for conjugation include those suitable for isolation or purification. Non-limiting examples include binding molecules, such as biotin (biotin-avidin specific binding pair), an antibody, a receptor, a ligand, a lectin, or molecules that comprise a solid support, including, for example, plastic or polystyrene beads, plates or beads, magnetic beads, test strips, and membranes. Purification methods such as cation exchange chromatography may be used to separate conjugates by charge difference, which effectively separates conjugates into their various molecular weights. The content of the fractions obtained by cation exchange chromatography may be identified by molecular weight using conventional methods, for example, mass spectroscopy, SDS-PAGE, or other known methods for separating molecular entities by molecular weight.

[0391] In some embodiments, the amino- or carboxyl-terminus of the peptide or protein sequence of the present disclosure can be fused with an immunoglobulin Fc region (e.g., human Fc) to form a fusion conjugate (or fusion molecule). Fc fusion conjugates have been shown to increase the systemic half-life of biopharmaceuticals, and thus the biopharmaceutical product may require less frequent administration. Fc binds to the neonatal Fc receptor (FcRn) in endothelial cells that line the blood vessels, and, upon binding, the Fc fusion molecule is protected from degradation and re-released into the circulation, keeping the molecule in circulation longer. This Fc binding is believed to be the mechanism by which endogenous IgG retains its long plasma half-life. More recent Fc-fusion technology links a single copy of a biopharmaceutical to the Fc region of an antibody to optimize the pharmacokinetic and pharmacodynamics properties of the biopharmaceutical as compared to traditional Fc-fusion conjugates.

[0392] The present disclosure contemplates the use of other modifications, currently known or developed in the future, of the peptides to improve one or more properties. One such method for prolonging the circulation half-life, increasing the stability, reducing the clearance, or altering the immunogenicity or allergenicity of the peptide of the present disclosure involves modification of the peptide sequences by hesylation, which utilizes hydroxyethyl starch derivatives linked to other molecules in order to modify the molecule's characteristics. Various aspects of hesylation are described in, for example, U.S. Patent Appln. Nos. 2007/0134197 and 2006/0258607.

[0393] Peptide stability can be assayed in a number of ways. For instance, peptidases and various biological media, such as human plasma and serum, have been used to test stability. See, e.g., Verhoef, et al., Eur. J. Drug Metab. Pharmacokinetics 11:291 (1986). Half-life of the peptides described herein is conveniently determined using a 25% human serum (v/v) assay. The protocol is as follows: pooled human serum (Type AB, non-heat inactivated) is dilapidated by centrifugation before use. The serum is then diluted to 25% with RPMI-1640 or another suitable tissue culture medium. At predetermined time intervals, a small amount of reaction solution is removed and added to either 6% aqueous trichloroacetic acid (TCA) or ethanol. The cloudy reaction sample is cooled (4° C.) for 15 minutes and then spun to pellet the precipitated serum proteins. The presence of the peptides is then determined by reversed-phase HPLC using stability-specific chromatography conditions.

[0394] Issues associated with short plasma half-life or susceptibility to protease degradation may be overcome by various modifications, including conjugating or linking the peptide or protein sequence to any of a variety of non-proteinaceous polymers, e.g., polyethylene glycol (PEG), polypropylene glycol, or polyoxyalkylenes (see, for example, typically via a linking moiety covalently bound to both the protein and the nonproteinaceous polymer, e.g., a PEG). Such PEG conjugated biomolecules have been shown to possess clinically useful properties, including better physical and thermal stability, protection against susceptibility to enzymatic degradation, increased solubility, longer in vivo circulating half-life and decreased clearance, reduced immunogenicity and antigenicity, and reduced toxicity.

[0395] PEGs suitable for conjugation to a polypeptide or protein sequence are generally soluble in water at room temperature, and have the general formula R—(O—CH₂—CH₂)ₙ—O—R, where R is hydrogen or a protective group such as an alkyl or an alkanol group, and where n is an integer from 1 to 1000. When R is a protective group, it generally has from 1 to 8 carbons. The PEG conjugated to the polypeptide sequence can be linear or branched. Branched PEG derivatives, “star-PEGs” and multi-armed PEGs are contemplated by the present disclosure. The present disclosure also contemplates compositions of conjugates wherein the PEGs have different n values and thus the various different PEGs are present in specific ratios. For example, some compositions comprise a mixture of conjugates where n=1, 2, 3 and 4. In some compositions, the percentage of conjugates where n=1 is 18-25%, the percentage of conjugates where n=2 is 50-66%, the percentage of conjugates where n=3 is 12-16%, and the percentage of conjugates where n=4 is up to 5%. Such compositions can be produced by reaction conditions and purification methods know in the art. For example, cation exchange chromatography may be used to separate conjugates, and a fraction is then identified which contains the conjugate having, for example, the desired number of PEGs attached, purified free from unmodified protein sequences and from conjugates having other numbers of PEGs attached.

[0396] PEG may be bound to the peptide or protein of the present disclosure via a terminal reactive group (a “spacer”). The spacer is, for example, a terminal reactive group which mediates a bond between the free amino or carboxyl groups of one or more of the polypeptide sequences and PEG. The PEG having the spacer which may be bound to the free amino group includes N-hydroxysuccinylimide PEG which may be prepared by activating succinic acid ester of PEG with N-hydroxysuccinylimide. Another activated PEG which may be bound to a free amino group is 2,4-bis(O-methoxypolyethyleneglycol)-6-chloro-s-triazine which may be prepared by reacting PEG monomethyl ether with cyanuric chloride. The activated PEG which is bound to the free carboxyl group includes polyoxyethylenediamine.

[0397] Conjugation of one or more of the peptide or protein sequences of the present disclosure to PEG having a spacer may be carried out by various conventional methods. For example, the conjugation reaction can be carried out in solution at a pH of from 5 to 10, at temperature from 4° C. to room temperature, for 30 minutes to 20 hours, utilizing a molar ratio of reagent to peptide/protein of from 4:1 to 30:1. Reaction conditions may be selected to direct the reaction towards producing predominantly a desired degree of substitution. In general, low temperature, low pH (e.g., pH=5), and short reaction time tend to decrease the number of PEGs attached, whereas high temperature, neutral to high pH (e.g., pH>7), and longer reaction time tend to increase the number of PEGs attached. Various means known in the art may be used to terminate the reaction. In some embodiments the reaction is terminated by acidifying the reaction mixture and freezing at, e.g., −20° C.

[0398] The present disclosure also contemplates the use of PEG mimetics. Recombinant PEG mimetics have been developed that retain the attributes of PEG (e.g., enhanced serum half-life) while conferring several additional advantageous properties. By way of example, simple polypeptide chains (comprising, for example, Ala, Glu, Gly, Pro, Ser and Thr) capable of forming an extended conformation similar to PEG can be produced recombinantly already fused to the peptide or protein drug of interest (e.g., Amunix XTEN technology; Mountain View, Calif.). This obviates the need for an additional conjugation step during the manufacturing process. Moreover, established molecular biology techniques enable control of the side chain composition of the polypeptide chains, allowing optimization of immunogenicity and manufacturing properties.

### Neoepitopes

[0399] A neoepitope comprises a neoantigenic determinant part of a neoantigenic peptide or neoantigenic polypeptide that is recognized by immune system. A neoepitope refers to an epitope that is not present in a reference, such as a non-diseased cell, e.g., a non-cancerous cell or a germline cell, but is found in a diseased cell, e.g., a cancer cell. This includes situations where a corresponding epitope is found in a normal non-diseased cell or a germline cell but, due to one or more mutations in a diseased cell, e.g., a cancer cell, the sequence of the epitope is changed so as to result in the neoepitope. The term “neoepitope” is used interchangeably with “tumor specific neoepitope” in the present specification to designate a series of residues, typically L-amino acids, connected one to the other, typically by peptide bonds between the α-amino and carboxyl groups of adjacent amino acids. The neoepitope can be a variety of lengths, either in their neutral (uncharged) forms or in forms which are salts, and either free of modifications such as glycosylation, side chain oxidation, or phosphorylation or containing these modifications, subject to the condition that the modification not destroy the biological activity of the polypeptides as herein described. The present disclosure provides isolated neoepitopes that comprise a tumor specific mutation from Table 1 or 2. The present disclosure also provided exemplary isolated neoepitopes that comprise a tumor specific mutation from Table 34. This disclosure also provides Exemplary isolated neoepitopes that comprise a tumor specific mutation from Tables 40A-40D and Table 3A-3D.

[0400] In some embodiments, neoepitopes described herein for HLA Class I are 13 residues or less in length and usually consist of between about 8 and about 12 residues, particularly 9 or 10 residues. In some embodiments, neoepitopes described herein for HLA Class II are 25 residues or less in length and usually consist of between about 16 and about 25 residues.

[0401] In some embodiments, the composition described herein comprises a first peptide comprising a first neoepitope of a protein and a second peptide comprising a second neoepitope of the same protein, wherein the first peptide is different from the second peptide, and wherein the first neoepitope comprises a mutation and the second neoepitope comprises the same mutation. In some embodiments, the composition described herein comprises a first peptide comprising a first neoepitope of a first region of a protein and a second peptide comprising a second neoepitope of a second region of the same protein, wherein the first region comprises at least one amino acid of the second region, wherein the first peptide is different from the second peptide and wherein the first neoepitope comprises a first mutation and the second neoepitope comprises a second mutation. In some embodiments, the first mutation and the second mutation are the same. In some embodiments, the mutation is selected from the group consisting of a point mutation, a splice-site mutation, a frameshift mutation, a read-through mutation, a gene fusion mutation and any combination thereof.

[0402] In some embodiments, the first neoepitope binds to a class I HLA protein to form a class I HLA-peptide complex. In some embodiments, the second neoepitope binds to a class II HLA a protein to form a class II HLA-peptide complex. In some embodiments, the second neoepitope binds to a class I HLA protein to form a class I HLA-peptide complex. In some embodiments, the first neoepitope binds to a class II HLA protein to form a class II HLA-peptide complex. In some embodiments, the first neoepitope activates CD8⁺ T cells. In some embodiments, the first neoepitope activates CD4⁺ T cells. In some embodiments, the second neoepitope activates CD4⁺ T cells. In some embodiments, the second neoepitope activates CD8⁺ T cells. In some embodiments, a TCR of a CD4⁺ T cell binds to a class II HLA-peptide complex. In some embodiments, a TCR of a CD8⁺ T cell binds to a class II HLA-peptide complex. In some embodiments, a TCR of a CD8⁺ T cell binds to a class I HLA-peptide complex. In some embodiments, a TCR of a CD4⁺ T cell binds to a class I HLA-peptide complex. In some embodiments, a composition comprising neoantigenic C481S BTK peptides comprises a first BTK neoepitope and a second BTK neoepitope. In some embodiments, the first BTK neoepitope comprises a neoepitope selected from Table 34. In some embodiments, the second BTK neoepitope comprises a neoepitope selected from Table 34.

[0403] In some embodiments, the first mutant BTK peptide sequence that is selected from Table 34 binds to or is predicted to bind to a protein encoded by an HLA allele listed in Table 34, corresponding to the respective peptide (left column versus right).

[0404] In some embodiments, a composition comprising neoantigenic EGFR peptides comprises a first EGFR neoepitope and a second EGFR neoepitope. In some embodiments, the first EGFR neoepitope comprises a neoepitope selected from Table 40A-40D. In some embodiments, the second EGFR neoepitope comprises a neoepitope selected from Table 40A-40D.

[0405] In some embodiments, a first mutant EGFR neoepitope is selected from a group consisting of STVQLIMQL, LIMQLMPF, LTSTVQLIM, TVQLIMQL, TSTVQLIMQL, TVQLIMQLM and VQLIMQLM.

[0406] In some embodiments, the first mutant EGFR peptide sequence that is selected from a group consisting of STVQLIMQL, LIMQLMPF, LTSTVQLIM, TVQLIMQL, TSTVQLIMQL, TVQLIMQLM and VQLIMQLM, binds to or is predicted to bind to a protein encoded by an HLA-A68:01 allele, an HLA-B15:02 allele, an HLA-A25:01 allele, an HLA-B57:03 allele, an HLA-C12:02 allele, an HLA-C03:02 allele, and HLA-A26:01 allele, an HLA-C12:03 allele, an HLA-C06:02 allele, an HLA-C03:03, an HLA-B52:01 allele, HLA-A30:01 allele, an HLA-C02:02 allele, an HLA-C12:03 allele, an HLA-A11:01 allele, an HLA-A32:01 allele, an HLA-A02:04 allele, an HLA-B15:09 allele, HLA-C17:01 allele, an HLA-C03:04 allele, an HLA-B08:01 allele, an HLA-A01:01 allele, an HLA-B42:01 allele, an HLA-B57:01 allele, an HLA-B14:02 allele, an HLA-B37:01 allele, an HLA-B36:01 allele, an HLA-B38:01 allele, an HLA-C03:03 allele, an HLA-B14:02 allele, an HLA-B37:01 allele, an HLA-A02:03 allele, an HLA-B58:02 allele, an HLA-C08:01 allele, an HLA-B35:01 allele, an HLA-B40:01 allele, and/or an HLA-B35:03 allele.

Table 41 provides a list of exemplary HLA alleles encoding an HLA protein that can bind or is predicted to bind to an EGFR neoantigenic peptide.

HLA-A23:01
HLA-A25:01
HLA-A26:01
HLA-A32:01
HLA-B15:01
HLA-B15:02
HLA-B38:01
HLA-B39:01
HLA-B39:06
HLA-B40:02
HLA-C03:02
HLA-C12:03
HLA-A01:01
HLA-C15:02
HLA-B57:01
HLA-B57:03
HLA-A36:01
HLA-C12:02
HLA-C03:03
HLA-B58:02
HLA-B15:01
HLA-A26:01
HLA-A68:02
HLA-C15:02
HLA-A25:01
HLA-B57:03
HLA-C12:02
HLA-A26:01
HLA-C12:03
HLA-C06:02
HLA-C03:03
HLA-A30:01
HLA-C02:02
HLA-A11:01
HLA-A32:01
HLA-A02:04
HLA-A68:01
HLA-B15:09
HLA-C03:04
HLA-B38:01
HLA-B57:01
HLA-A02:03
HLA-C08:01
HLA-B35:01
HLA-B40:01
HLA-A26:01
HLA-B57:01
HLA-C15:02
HLA-C17:01
HLA-B08:01
HLA-B42:01
HLA-B14:02
HLA-B37:01
HLA-B15:09
HLA-B35:03
HLA-B52:01
HLA-B14:02
HLA-B37:01

Tables 42Ai, 42Aii and 42B show EGFR neoepitopes with predicted HLA subtype specificity.
Tables 5Ai, 5Aii and 5B show EGFR neoepitopes with predicted HLA subtype specificity.

TABLE 42Ai

| | Mutation | | |
|---|---|---|---|
| EGFR | Sequence | | HLA |
| mutation | Context | Peptides | allele |
| S492R | SLNITSLGLRSLKEISDGDVI | IIRNRGENSCK | A03.01 |
| | ISGNKNLCYANTINWKKLFGT | | |
| | SGQKTKIIRNRGENSCKATGQ | | |
| | VCHALCSPEGCWGPEPRDCVS | | |
| | CRNVSRGRECVDKCNLL | | |

TABLE 42Aii

| | Mutation | | |
|---|---|---|---|
| EGFR | Sequence | | HLA |
| mutation | Context | Peptides | allele |
| T790M | IPVAIKELREATSP | CLTSTVQLIM | A01.01, A02.01 |
| | KANKEILDEAYVM | IMQLMPFGC | A02.01 |
| | ASVDNPHVCRLLG | IMQLMPFGCL | A02.01, A24.02, |
| | ICLTSTVQLIMQLM | | B08.01 |
| | PFGCLLDYVREHK | LIMQLMPFG | A02.01 |
| | DNIGSQYLLNWCV | LIMQLMPFGC | A02.01 |
| | QIAKGMNYLEDRR | LTSTVQLIM | A01.01 |
| | LVHRDLAA | MQLMPFGCL | A02.01, B07.02, |
| | | | B08.01 |
| | | MQLMPFGCLL | A02.01, A24.02, |
| | | | B08.01 |
| | | VQLIMQLMPF | A02.01, A24.02, |
| | | | B08.01 |
| | | LIMQLMPF | HLA-C03:02 |
| | | LTSTVQLIM | HLA-C12:03, |
| | | | HLA-A01:01, |
| | | | HLA-C15:02, |
| | | | HLA-B57:01 |
| | | | HLA-B57:03, |
| | | | HLA-A36:01, |
| | | | HLA-C12:02, |
| | | | HLA-C03:03, |
| | | | HLA-B58:02, |
| | | QLIMQLMPF | HLA-A26:01 |
| | | STVQLIMQL | HLA-A68:02, |
| | | | HLA-C15:02, |
| | | | HLA-A25:01, |
| | | | HLA-B57:03, |
| | | | HLA-C12:02, |
| | | | HLA-A26:01, |
| | | | HLA-C12:03, |
| | | | HLA-C06:02, |
| | | | HLA-C03:03, |
| | | | HLA-A30:01, |
| | | | HLA-C02:02, |
| | | | HLA-A11:01, |
| | | | HLA-A32:01, |
| | | | HLA-A02:04, |
| | | | HLA-A68:01, |
| | | | HLA-B15:09, |
| | | | HLA-C03:04, |
| | | | HLA-B38:01, |
| | | | HLA-B57:01, |
| | | | HLA-A02:03, |
| | | | HLA-C08:01, |
| | | | HLA-B35:01, |
| | | | HLA-B40:01 |
| | | STVQLIMQLM | HLA-B57:01 |
| | | TSTVQLIMQL | HLA-C15:02 |
| | | TVQLIMQL | HLA-C17:01, |
| | | | HLA-B08:01, |
| | | | HLA-B42:01, |
| | | | HLA-B14:02, |
| | | | HLA-B37:01, |
| | | | HLA-B15:09 |
| | | TVQLIMQLM | HLA-B35:03 |
| | | VQLIMQLM | HLA-B52:01, |
| | | | HLA-B14:02, |
| | | | HLA-B37:01 |

TABLE 42B

| | Mutation | | |
|---|---|---|---|
| EGFR | Sequence | | HLA |
| mutation | Context | Peptides | allele |
| EGFRvIII | MRPSGTAGAALLALLA | ALEEKKGNYV | A02.01 |
| (internal | ALCPASRALEEKK:G: | | |
| deletion) | NYVVTDHGSCVRACGA | | |
| | DSYEMEEDGVRKCKKC | | |
| | EGPCRKVCNGIGIGEF | | |
| | KD | | |
| EGFR: | LPQPPICTIDVYMIMV | IQLQDKFEHL | A02.01, |
| SEPT14 | KCWMIDADSRPKFREL | | B08.01 |
| | IIEFSKMARDPQRYLV | QLQDKFEHL | A02.01, |
| | IQ::LQDKFEHLKMIQ | | B08.01 |
| | QEEIRKLEEEKKQLEG | QLQDKFEHLK | A03.01 |
| | EIIDFYKMKAASEALQ | YLVIQLQDKF | A02.01, |
| | TQLSTD | | A24.02 |

[0407] In some embodiments, the first and the second neoepitopes are different epitopes. In some embodiments, the second neoepitope is longer than the first neoepitope. In some embodiments, the first neoepitope has a length of at least 8 amino acids. In some embodiments, the first neoepitope has a length of from 8 to 12 amino acids. In some embodiments, the first neoepitope comprises a sequence of at least 8 contiguous amino acids, wherein at least 1 of the 8 contiguous amino acids are different at corresponding positions of a wild-type sequence. In some embodiments, the first neoepitope comprises a sequence of at least 8 contiguous amino acids, wherein at least 2 of the 8 contiguous amino acids are different at corresponding positions of a wild-type sequence. In some embodiments, the second neoepitope has a length of at least 16 amino acids. In some embodiments, the second neoepitope has a length of from 16 to 25 amino acids. In some embodiments, the second neoepitope comprises a sequence of at least 16 contiguous amino acids, wherein at least 1 of the 16 contiguous amino acids are different at corresponding positions of a wild-type sequence. In some embodiments, the second neoepitope comprises a sequence of at least 16 contiguous amino acids, wherein at least 2 of the 16 contiguous amino acids are different at corresponding positions of a wild-type sequence.

[0408] In some embodiments, the neoepitope comprises at least one anchor residue. In some embodiments, the first neoepitope, the second neoepitope or both comprises at least one anchor residue. In one embodiment, the at least one anchor residue of the first neoepitope is at a canonical anchor position or a non-canonical anchor position. In another embodiment, the at least one anchor residue of the second neoepitope is at a canonical anchor position or a non-canonical anchor position. In yet another embodiment, the at least one anchor residue of the first neoepitope is different from the at least one anchor residue of the second neoepitope.

[0409] In some embodiments, the at least one anchor residue is a wild-type residue. In some embodiments, the at least one anchor residue is a substitution. In some embodiments, at least one anchor residue does not comprise the mutation.

[0410] In some embodiments, the first or the second neoepitope or both comprise at least one anchor residue flanking region. In some embodiments, the neoepitope comprises at least one anchor residue. In some embodiments, the at least one anchor residues comprises at least two anchor residues. In some embodiments, the at least two anchor residues are separated by a separation region comprising at least 1 amino acid. In some embodiments, the at least one anchor residue flanking region is not within the separation region. In some embodiments, the at least one anchor residue flanking region is (a) upstream of a N-terminal anchor residue of the at least two anchor residues; (b) downstream of a C-terminal anchor residue of the at least two anchor residues; or both (a) and (b). In some embodiments, the second neopeptide is selected from Table 34.

[0411] In some embodiments, the second neoepitope comprises a mutation T790M. In some embodiments, the second neoepitope comprising an EGFR T790M mutation comprises a sequence of VQLIMQLMPF. In some embodiments the second neoepitope comprising an EGFR T790M mutation comprises a sequence of STVQLIMQLM. In some embodiments, the second neoepitope comprising a EGFR T790M mutation comprises a sequence of QLIMQLMPF. In some embodiments, the second neoepitope comprising an EGFR T790M mutation comprises a sequence of MQLMPFGCLL. In some embodiments, the second neoepitope comprising an EGFR T790M mutation comprises a sequence of LIMQLMPF. In some embodiments, the second neoepitope comprising an EGFR T790M mutation comprises a neoepitope sequence of LTSTVQLIM. In some embodiments, the second neopeptide comprising an EGFR T790M mutation comprises a sequence of STVQLIMQL. In some embodiments, the second neoepitope comprising an EGFR T790M mutation comprises a sequence of TSTVQLIMQL. In some embodiments the second neoepitope comprising an EGFR T790M mutation comprises a sequence of TVQLIMQL. In some embodiments the second neoepitope comprising an EGFR T790M mutation comprises a sequence of TVQLIMQLM. In some embodiments the second neoepitope comprising an EGFR T790M mutation comprises a sequence of VQLIMQLM. In some embodiments, the second neoepitope comprising an EGFR T790M mutation comprises a sequence of CLTSTVQLIM. In some embodiments, the second neoepitope comprising an EGFR T790M mutation comprises a sequence of IMQLMPFGC. In some embodiments, the second neoepitope comprising an EGFR T790M mutation comprises a sequence of IMQLMPFGC. In some embodiments, the second neoepitope comprising an EGFR T790M mutation comprises a sequence of IMQLMPFGCL. In some embodiments the second neoepitope comprising an EGFR T790M mutation comprises a neoepitope sequence of LIMQLMPFG. In some embodiments the second neoepitope comprising an EGFR T790M mutation comprises a sequence of LIMQLMPFGC. In some embodiments, the second neoepitope comprising an EGFR T790M mutation comprises a sequence of QLIMQLMPFG.

[0412] In some embodiments, the second neoepitope comprising an EGFR S492R mutation. In some embodiments, a peptide comprising an EGFR S492R mutation comprises a neoepitope sequence of IIRNRGENSCK.

[0413] In some embodiments, the second EGFR neoepitope comprising a deletion mutation in EGFR, such as deletion of G in EGFRvIII (internal deletion), wherein the neoepitope sequence is ALEEKKGNYV.

[0414] In some embodiments, a second neoepitope comprising a mutation depicted in the sequence: LPQPPICTIDVYMIMVKCWMIDADSRPKFRELIIEFSKMARDPQRYLVIQ::LQDKFEHLKMIQQEEIR KLEEEKKQLEGEIIDFYKMKAASEALQTQLSTD, wherein the neoepitope sequence is IQLQDKFEHL. In some embodiments, the second neoepitope sequence is QLQDKFEHL. In some embodiments, the second neoepitope sequence is QLQDKFEHLK. In some embodiments, the second neoepitope sequence is YLVIQLQDKF.

[0415] In some embodiments, the second neopeptide is selected from Table 35 or Table 3A-Table 3D.

[0416] In some embodiments, the neoepitopes bind an HLA protein (e.g., HLA class I or HLA class II). In some embodiments, the neoepitopes bind an HLA protein with greater affinity than the corresponding wild-type peptide. In some embodiments, the neoepitope has an IC₅₀ of less than 5,000 nM, less than 1,000 nM, less than 500 nM, less than 100 nM, less than 50 nM, or less.

[0417] In some embodiments, the neoepitope can have an HLA binding affinity of between about 1 μM and about 1 mM, about 100 μM and about 500 μM, about 500 μM and about 10 μM, about 1 nM and about 1 μM, or about 10 nM and about 1 μM. In some embodiments, the neoepitope can have an HLA binding affinity of at least 2, 3, 4, 5, 6, 7, 8, 9, 10, 15, 20, 25, 30, 35, 40, 45, 50, 55, 60, 65, 70, 75, 80, 85, 90, 95, 100, 150, 200, 250, 300, 350, 400, 450, 500, 550, 600, 700, 800, 900, or 1,000 nM, or more. In some embodiments, the neoepitope can have an HLA binding affinity of at most 2, 3, 4, 5, 6, 7, 8, 9, 10, 15, 20, 25, 30, 35, 40, 45, 50, 55, 60, 65, 70, 75, 80, 85, 90, 95, 100, 150, 200, 250, 300, 350, 400, 450, 500, 550, 600, 700, 800, 900, or 1,000 nM.

[0418] In some embodiments, the first and/or second neoepitope binds to an HLA protein with a greater affinity than a corresponding wild-type neoepitope. In some embodiments, the first and/or second neoepitope binds to an HLA protein with a K_{D} or an IC₅₀ less than 1,000 nM, 900 nM, 800 nM, 700 nM, 600 nM, 500 nM, 250 nM, 150 nM, 100 nM, 50 nM, 25 nM or 10 nM. In some embodiments, the first and/or second neoepitope binds to an HLA class I protein with a K_{D} or an IC₅₀ less than 1,000 nM, 900 nM, 800 nM, 700 nM, 600 nM, 500 nM, 250 nM, 150 nM, 100 nM, 50 nM, 25 nM or 10 nM. In some embodiments, the first and/or second neoepitope binds to an HLA class II protein with a K_{D} or an IC₅₀ less than 2,000 nM, 1,500 nM, 1,000 nM, 900 nM, 800 nM, 700 nM, 600 nM, 500 nM, 250 nM, 150 nM, 100 nM, 50 nM, 25 nM or 10 nM.

[0419] In an aspect, the first and/or second neoepitope binds to a protein encoded by an HLA allele expressed by a subject. In another aspect, the mutation is not present in non-cancer cells of a subject. In yet another aspect, the first and/or second neoepitope is encoded by a gene or an expressed gene of a subject's cancer cells.

[0420] In some embodiments, the first neoepitope comprises a mutation as depicted in column 2 of Table 1 or 2. In some embodiments, the second neoepitope comprises a mutation as depicted in column 2 of Table 1 or 2. In some embodiments, certain antigenic peptides are paired with specific alleles.

[0421] A substitution may be positioned anywhere along the length of the neoepitope. For example, it can be located in the N terminal third of the peptide, the central third of the peptide or the C terminal third of the peptide. In another embodiment, the substituted residue is located 2-5 residues away from the N terminal end or 2-5 residues away from the C terminal end. The peptides can be similarly derived from tumor specific insertion mutations where the peptide comprises one or more, or all of the inserted residues.

[0422] In some embodiments, the peptide as described herein can be readily synthesized chemically utilizing reagents that are free of contaminating bacterial or animal substances (Merrifield R B: Solid phase peptide synthesis. I. The synthesis of a tetrapeptide. J. Am. Chem. Soc. 85:2149-54, 1963). In some embodiments, peptides are prepared by (1) parallel solid-phase synthesis on multi-channel instruments using uniform synthesis and cleavage conditions; (2) purification over a RP-HPLC column with column stripping; and re-washing, but not replacement, between peptides; followed by (3) analysis with a limited set of the most informative assays. The Good Manufacturing Practices (GMP) footprint can be defined around the set of peptides for an individual patient, thus requiring suite changeover procedures only between syntheses of peptides for different patients.

### Polynucleotides

[0423] Alternatively, a nucleic acid (e.g., a polynucleotide) encoding the peptide of the present disclosure may be used to produce the neoantigenic peptide in vitro. The polynucleotide may be, e.g., DNA, cDNA, PNA, CNA, RNA, either single- and/or double-stranded, or native or stabilized forms of polynucleotides, such as e.g. polynucleotides with a phosphorothiate backbone, or combinations thereof and it may or may not contain introns so long as it codes for the peptide. In some embodiments in vitro translation is used to produce the peptide.

[0424] Provided herein are neoantigenic polynucleotides encoding each of the neoantigenic peptides described in the present disclosure. The term “polynucleotide”, “nucleotides” or “nucleic acid” is used interchangeably with “mutant polynucleotide”, “mutant nucleotide”, “mutant nucleic acid”, “neoantigenic polynucleotide”, “neoantigenic nucleotide” or “neoantigenic mutant nucleic acid” in the present disclosure. Various nucleic acid sequences can encode the same peptide due to the redundancy of the genetic code. Each of these nucleic acids falls within the scope of the present disclosure. Nucleic acids encoding peptides can be DNA or RNA, for example, mRNA, or a combination of DNA and RNA. In some embodiments, a nucleic acid sequence encoding a peptide is a self-amplifying mRNA (Brito et al., Adv. Genet. 2015; 89:179-233). Any suitable polynucleotide that encodes a peptide described herein falls within the scope of the present disclosure.

[0425] The term “RNA” includes and in some embodiments relates to “mRNA.” The term “mRNA” means “messenger-RNA” and relates to a “transcript” which is generated by using a DNA template and encodes a peptide or polypeptide. Typically, an mRNA comprises a 5′-UTR, a protein coding region, and a 3′-UTR. mRNA only possesses limited half-life in cells and in vitro. In some embodiments, the mRNA is self-amplifying mRNA. In the context of the present disclosure, mRNA may be generated by in vitro transcription from a DNA template. The in vitro transcription methodology is known to the skilled person. For example, there is a variety of in vitro transcription kits commercially available.

[0426] The stability and translation efficiency of RNA may be modified as required. For example, RNA may be stabilized and its translation increased by one or more modifications having a stabilizing effects and/or increasing translation efficiency of RNA. Such modifications are described, for example, in PCT/EP2006/009448, incorporated herein by reference. In order to increase expression of the RNA used according to the present disclosure, it may be modified within the coding region, i.e., the sequence encoding the expressed peptide or protein, without altering the sequence of the expressed peptide or protein, so as to increase the GC-content to increase mRNA stability and to perform a codon optimization and, thus, enhance translation in cells.

[0427] The term “modification” in the context of the RNA used in the present disclosure includes any modification of an RNA which is not naturally present in said RNA. In some embodiments, the RNA does not have uncapped 5′-triphosphates. Removal of such uncapped 5′-triphosphates can be achieved by treating RNA with a phosphatase. In other embodiments, the RNA may have modified ribonucleotides in order to increase its stability and/or decrease cytotoxicity. In some embodiments, 5-methylcytidine can be substituted partially or completely in the RNA, for example, for cytidine. Alternatively, pseudouridine is substituted partially or completely, for example, for uridine.

[0428] In some embodiments, the term “modification” relates to providing an RNA with a 5′-cap or 5′-cap analog. The term “5′-cap” refers to a cap structure found on the 5′-end of an mRNA molecule and generally consists of a guanosine nucleotide connected to the mRNA via an unusual 5′ to 5′ triphosphate linkage. In some embodiments, this guanosine is methylated at the 7-position. The term “conventional 5′-cap” refers to a naturally occurring RNA 5′-cap, to the 7-methylguanosine cap (m G). In the context of the present disclosure, the term “5′-cap” includes a 5′-cap analog that resembles the RNA cap structure and is modified to possess the ability to stabilize RNA and/or enhance translation of RNA if attached thereto, in vivo and/or in a cell.

[0429] In certain embodiments, an mRNA encoding a neoantigenic peptide of the present disclosure is administered to a subject in need thereof. In some embodiments, the present disclosure provides RNA, oligoribonucleotide, and polyribonucleotide molecules comprising a modified nucleoside, gene therapy vectors comprising same, gene therapy methods and gene transcription silencing methods comprising same. In some embodiments, the mRNA to be administered comprises at least one modified nucleoside.

[0430] The polynucleotides encoding peptides described herein can be synthesized by chemical techniques, for example, the phosphotriester method of Matteucci, et al., J. Am. Chem. Soc. 103:3185 (1981). Polynucleotides encoding peptides comprising or consisting of an analog can be made simply by substituting the appropriate and desired nucleic acid base(s) for those that encode the native epitope.

[0431] Polynucleotides described herein can comprise one or more synthetic or naturally-occurring introns in the transcribed region. The inclusion of mRNA stabilization sequences and sequences for replication in mammalian cells can also be considered for increasing polynucleotide expression. In addition, a polynucleotide described herein can comprise immunostimulatory sequences (ISSs or CpGs). These sequences can be included in the vector, outside the polynucleotide coding sequence to enhance immunogenicity.

[0432] In some embodiments, the polynucleotides may comprise the coding sequence for the peptide or protein fused in the same reading frame to a polynucleotide which aids, for example, in expression and/or secretion of the peptide or protein from a host cell (e.g., a leader sequence which functions as a secretory sequence for controlling transport of a polypeptide from the cell). The polypeptide having a leader sequence is a pre-protein and can have the leader sequence cleaved by the host cell to form the mature form of the polypeptide.

[0433] In some embodiments, the polynucleotides can comprise the coding sequence for the peptide or protein fused in the same reading frame to a marker sequence that allows, for example, for purification of the encoded peptide, which may then be incorporated into a personalized disease vaccine or immunogenic composition. For example, the marker sequence can be a hexa-histidine tag supplied by a pQE-9 vector to provide for purification of the mature polypeptide fused to the marker in the case of a bacterial host, or the marker sequence can be a hemagglutinin (HA) tag derived from the influenza hemagglutinin protein when a mammalian host (e.g., COS-7 cells) is used. Additional tags include, but are not limited to, Calmodulin tags, FLAG tags, Myc tags, S tags, SBP tags, Softag 1, Softag 3, V5 tag, Xpress tag, Isopeptag, SpyTag, Biotin Carboxyl Carrier Protein (BCCP) tags, GST tags, fluorescent protein tags (e.g., green fluorescent protein tags), maltose binding protein tags, Nus tags, Strep-tag, thioredoxin tag, TC tag, Ty tag, and the like.

[0434] In some embodiments, the polynucleotides may comprise the coding sequence for one or more the presently described peptides or proteins fused in the same reading frame to create a single concatamerized neoantigenic peptide construct capable of producing multiple neoantigenic peptides.

[0435] In some embodiments, a DNA sequence is constructed using recombinant technology by isolating or synthesizing a DNA sequence encoding a wild-type protein of interest. Optionally, the sequence can be mutagenized by site-specific mutagenesis to provide functional analogs thereof. See, e.g. Zoeller et al., Proc. Nat'l. Acad. Sci. USA 81:5662-5066 (1984) and U.S. Pat. No. 4,588,585. In another embodiment, a DNA sequence encoding the peptide or protein of interest would be constructed by chemical synthesis using an oligonucleotide synthesizer. Such oligonucleotides can be designed based on the amino acid sequence of the desired peptide and selecting those codons that are favored in the host cell in which the recombinant polypeptide of interest is produced. Standard methods can be applied to synthesize an isolated polynucleotide sequence encoding an isolated polypeptide of interest. For example, a complete amino acid sequence can be used to construct a back-translated gene. Further, a DNA oligomer containing a nucleotide sequence coding for the particular isolated polypeptide can be synthesized. For example, several small oligonucleotides coding for portions of the desired polypeptide can be synthesized and then ligated. The individual oligonucleotides typically contain 5′ or 3′ overhangs for complementary assembly

[0436] Once assembled (e.g., by synthesis, site-directed mutagenesis, or another method), the polynucleotide sequences encoding a particular isolated polypeptide of interest is inserted into an expression vector and optionally operatively linked to an expression control sequence appropriate for expression of the protein in a desired host. Proper assembly can be confirmed by nucleotide sequencing, restriction mapping, and expression of a biologically active polypeptide in a suitable host. As well known in the art, in order to obtain high expression levels of a transfected gene in a host, the gene can be operatively linked to transcriptional and translational expression control sequences that are functional in the chosen expression host.

[0437] Thus, the present disclosure is also directed to vectors, and expression vectors useful for the production and administration of the neoantigenic peptides and neoepitopes described herein, and to host cells comprising such vectors.

### Vectors

[0438] In some embodiments, an expression vector capable of expressing the peptide or protein as described herein can also be prepared. Expression vectors for different cell types are well known in the art and can be selected without undue experimentation. Generally, the DNA is inserted into an expression vector, such as a plasmid, in proper orientation and correct reading frame for expression. If necessary, the DNA may be linked to the appropriate transcriptional and translational regulatory control nucleotide sequences recognized by the desired host (e.g., bacteria), although such controls are generally available in the expression vector. The vector is then introduced into the host bacteria for cloning using standard techniques (see, e.g., Sambrook et al. (1989) Molecular Cloning, A Laboratory Manual, Cold Spring Harbor Laboratory, Cold Spring Harbor, N.Y.).

[0439] A large number of vectors and host systems suitable for producing and administering a neoantigenic peptide described herein are known to those of skill in the art, and are commercially available. The following vectors are provided by way of example. Bacterial: pQE70, pQE60, pQE-9 (Qiagen), pBS, pD10, phagescript, psiX174, pBluescript SK, pbsks, pNH8A, pNH16a, pNH18A, pNH46A (Stratagene); ptrc99a, pKK223-3, pKK233-3, pDR540, pRIT5 (Pharmacia); pCR (Invitrogen). Eukaryotic: pWLNEO, pSV2CAT, pOG44, pXT1, pSG (Stratagene) pSVK3, pBPV, pMSG, pSVL (Pharmacia); p75.6 (Valentis); pCEP (Invitrogen); pCEI (Epimmune). However, any other plasmid or vector can be used as long as it is replicable and viable in the host.

[0440] For expression of the neoantigenic peptides described herein, the coding sequence will be provided operably linked start and stop codons, promoter and terminator regions, and in some embodiments, and a replication system to provide an expression vector for expression in the desired cellular host. For example, promoter sequences compatible with bacterial hosts are provided in plasmids containing convenient restriction sites for insertion of the desired coding sequence. The resulting expression vectors are transformed into suitable bacterial hosts.

[0441] Mammalian expression vectors will comprise an origin of replication, a suitable promoter and enhancer, and also any necessary ribosome binding sites, polyadenylation site, splice donor and acceptor sites, transcriptional termination sequences, and 5′ flanking nontranscribed sequences. Such promoters can also be derived from viral sources, such as, e.g., human cytomegalovirus (CMV-IE promoter) or herpes simplex virus type-1 (HSV TK promoter). Nucleic acid sequences derived from the SV40 splice, and polyadenylation sites can be used to provide the required nontranscribed genetic elements.

[0442] Recombinant expression vectors may be used to amplify and express DNA encoding the peptide or protein as described herein. Recombinant expression vectors are replicable DNA constructs which have synthetic or cDNA-derived DNA fragments encoding a peptide or a bioequivalent analog operatively linked to suitable transcriptional or translational regulatory elements derived from mammalian, microbial, viral or insect genes. A transcriptional unit generally comprises an assembly of (1) a genetic element or elements having a regulatory role in gene expression, for example, transcriptional promoters or enhancers, (2) a structural or coding sequence which is transcribed into mRNA and translated into protein, and (3) appropriate transcription and translation initiation and termination sequences, as described in detail herein. Such regulatory elements can include an operator sequence to control transcription. The ability to replicate in a host, usually conferred by an origin of replication, and a selection gene to facilitate recognition of transformants can additionally be incorporated. DNA regions are operatively linked when they are functionally related to each other. For example, DNA for a signal peptide (secretory leader) is operatively linked to DNA for a polypeptide if it is expressed as a precursor which participates in the secretion of the polypeptide; a promoter is operatively linked to a coding sequence if it controls the transcription of the sequence; or a ribosome binding site is operatively linked to a coding sequence if it is positioned so as to permit translation. Generally, operatively linked means contiguous, and in the case of secretory leaders, means contiguous and in reading frame. Structural elements intended for use in yeast expression systems include a leader sequence enabling extracellular secretion of translated protein by a host cell. Alternatively, where recombinant protein is expressed without a leader or transport sequence, it can include an N-terminal methionine residue. This residue can optionally be subsequently cleaved from the expressed recombinant protein to provide a final product.

[0443] Generally, recombinant expression vectors will include origins of replication and selectable markers permitting transformation of the host cell, e.g., the ampicillin resistance gene of E. coli and S. cerevisiae TRP1 gene, and a promoter derived from a highly-expressed gene to direct transcription of a downstream structural sequence. Such promoters can be derived from operons encoding glycolytic enzymes such as 3-phosphoglycerate kinase (PGK), acid phosphatase, or heat shock proteins, among others. The heterologous structural sequence is assembled in appropriate phase with translation initiation and termination sequences, and in some embodiments, a leader sequence capable of directing secretion of translated protein into the periplasmic space or extracellular medium. Optionally, the heterologous sequence can encode a fusion protein including an N-terminal identification peptide imparting desired characteristics, e.g., stabilization or simplified purification of expressed recombinant product.

[0444] Polynucleotides encoding neoantigenic peptides described herein can also comprise a ubiquitination signal sequence, and/or a targeting sequence such as an endoplasmic reticulum (ER) signal sequence to facilitate movement of the resulting peptide into the endoplasmic reticulum.

[0445] In some embodiments, the neoantigenic peptide described herein can also be administered and/or expressed by viral or bacterial vectors. Examples of expression vectors include attenuated viral hosts, such as vaccinia or fowlpox. As an example of this approach, vaccinia virus is used as a vector to express nucleotide sequences that encode the neoantigenic peptides described herein. Vaccinia vectors and methods useful in immunization protocols are described in, e.g., U.S. Pat. No. 4,722,848. Another vector is BCG (Bacille Calmette Guerin). BCG vectors are described by Stover et al., Nature 351:456-460 (1991).

[0446] A wide variety of other vectors useful for therapeutic administration or immunization of the neoantigenic polypeptides described herein, e.g. adeno and adeno-associated virus vectors, retroviral vectors, Salmonella Typhimurium vectors, detoxified anthrax toxin vectors, Sendai virus vectors, poxvirus vectors, canarypox vectors, and fowlpox vectors, and the like, will be apparent to those skilled in the art from the description herein. In some embodiments, the vector is Modified Vaccinia Ankara (VA) (e.g. Bavarian Noridic (MVA-BN)).

[0447] Among vectors that may be used in the practice of the present disclosure, integration in the host genome of a cell is possible with retrovirus gene transfer methods, often resulting in long term expression of the inserted transgene. In some embodiments, the retrovirus is a lentivirus. Additionally, high transduction efficiencies have been observed in many different cell types and target tissues. The tropism of a retrovirus can be altered by incorporating foreign envelope proteins, expanding the potential target population of target cells. A retrovirus can also be engineered to allow for conditional expression of the inserted transgene, such that only certain cell types are infected by the lentivirus. Cell type specific promoters can be used to target expression in specific cell types. Lentiviral vectors are retroviral vectors (and hence both lentiviral and retroviral vectors may be used in the practice of the present disclosure). Moreover, lentiviral vectors are able to transduce or infect non-dividing cells and typically produce high viral titers. Selection of a retroviral gene transfer system may therefore depend on the target tissue. Retroviral vectors are comprised of cis-acting long terminal repeats with packaging capacity for up to 6-10 kb of foreign sequence. The minimum cis-acting LTRs are sufficient for replication and packaging of the vectors, which are then used to integrate the desired nucleic acid into the target cell to provide permanent expression. Widely used retroviral vectors that may be used in the practice of the present disclosure include those based upon murine leukemia virus (MuLV), gibbon ape leukemia virus (GaLV), Simian Immunodeficiency virus (SIV), human immunodeficiency virus (HIV), and combinations thereof (see, e.g., Buchscher et al., (1992) J. Virol. 66:2731-2739; Johann et al., (1992) J. Virol. 66:1635-1640; Sommnerfelt et al., (1990) Virol. 176:58-59; Wilson et al., (1998) J. Virol. 63:2374-2378; Miller et al., (1991) J. Virol. 65:2220-2224; PCT/US94/05700).

[0448] Also useful in the practice of the present disclosure is a minimal non-primate lentiviral vector, such as a lentiviral vector based on the equine infectious anemia virus (EIAV). The vectors may have cytomegalovirus (CMV) promoter driving expression of the target gene. Accordingly, the present disclosure contemplates amongst vector(s) useful in the practice of the present disclosure: viral vectors, including retroviral vectors and lentiviral vectors.

[0449] Also useful in the practice of the present disclosure is an adenovirus vector. One advantage is the ability of recombinant adenoviruses to efficiently transfer and express recombinant genes in a variety of mammalian cells and tissues in vitro and in vivo, resulting in the high expression of the transferred nucleic acids. Further, the ability to productively infect quiescent cells, expands the utility of recombinant adenoviral vectors. In addition, high expression levels ensure that the products of the nucleic acids will be expressed to sufficient levels to generate an immune response (see e.g., U.S. Pat. No. 7,029,848, hereby incorporated by reference).

[0450] As to adenovirus vectors useful in the practice of the present disclosure, mention is made of U.S. Pat. No. 6,955,808. The adenovirus vector used can be selected from the group consisting of the Ad5, Ad35, Ad11, C6, and C7 vectors. The sequence of the Adenovirus 5 (“Ad5”) genome has been published. (Chroboczek, J., Bieber, F., and Jacrot, B. (1992) The Sequence of the Genome of Adenovirus Type 5 and Its Comparison with the Genome of Adenovirus Type 2, Virology 186, 280-285; the contents if which is hereby incorporated by reference). Ad35 vectors are described in U.S. Pat. Nos. 6,974,695, 6,913,922, and 6,869,794. Ad11 vectors are described in U.S. Pat. No. 6,913,922. C6 adenovirus vectors are described in U.S. Pat. Nos. 6,780,407; 6,537,594; 6,309,647; 6,265,189; 6,156,567; 6,090,393; 5,942,235 and 5,833,975. C7 vectors are described in U.S. Pat. No. 6,277,558. Adenovirus vectors that are E1-defective or deleted, E3-defective or deleted, and/or E4-defective or deleted may also be used. Certain adenoviruses having mutations in the E1 region have improved safety margin because E1-defective adenovirus mutants are replication-defective in non-permissive cells, or, at the very least, are highly attenuated. Adenoviruses having mutations in the E3 region may have enhanced the immunogenicity by disrupting the mechanism whereby adenovirus down-regulates MHC class I molecules. Adenoviruses having E4 mutations may have reduced immunogenicity of the adenovirus vector because of suppression of late gene expression. Such vectors may be particularly useful when repeated re-vaccination utilizing the same vector is desired. Adenovirus vectors that are deleted or mutated in E1, E3, E4; E1 and E3; and E1 and E4 can be used in accordance with the present disclosure.

[0451] Furthermore, “gutless” adenovirus vectors, in which all viral genes are deleted, can also be used in accordance with the present disclosure. Such vectors require a helper virus for their replication and require a special human 293 cell line expressing both Ela and Cre, a condition that does not exist in natural environment. Such “gutless” vectors are non-immunogenic and thus the vectors may be inoculated multiple times for re-vaccination. The “gutless” adenovirus vectors can be used for insertion of heterologous inserts/genes such as the transgenes of the present disclosure, and can even be used for co-delivery of a large number of heterologous inserts/genes.

[0452] In some embodiments, the delivery is via an adenovirus, which may be at a single booster dose. In some embodiments, the adenovirus is delivered via multiple doses. In terms of in vivo delivery, AAV is advantageous over other viral vectors due to low toxicity and low probability of causing insertional mutagenesis because it doesn't integrate into the host genome. AAV has a packaging limit of 4.5 or 4.75 Kb. Constructs larger than 4.5 or 4.75 Kb result in significantly reduced virus production. There are many promoters that can be used to drive nucleic acid molecule expression. AAV ITR can serve as a promoter and is advantageous for eliminating the need for an additional promoter element.

[0453] For ubiquitous expression, the following promoters can be used: CMV, CAG, CBh, PGK, SV40, Ferritin heavy or light chains, etc. For brain expression, the following promoters can be used: Synapsin I for all neurons, CaMK II alpha for excitatory neurons, GAD67 or GAD65 or VGAT for GABAergic neurons, etc. Promoters used to drive RNA synthesis can include: Pol III promoters such as U6 or H1. The use of a Pol II promoter and intronic cassettes can be used to express guide RNA (gRNA). With regard to AAV vectors useful in the practice of the present disclosure, mention is made of U.S. Pat. Nos. 5,658,785, 7,115,391, 7,172,893, 6,953,690, 6,936,466, 6,924,128, 6,893,865, 6,793,926, 6,537,540, 6,475,769 and 6,258,595, and documents cited therein. As to AAV, the AAV can be AAV1, AAV2, AAV5 or any combination thereof. One can select the AAV with regard to the cells to be targeted; e.g., one can select AAV serotypes 1, 2, 5 or a hybrid capsid AAV1, AAV2, AAV5 or any combination thereof for targeting brain or neuronal cells; and one can select AAV4 for targeting cardiac tissue. AAV8 is useful for delivery to the liver. In some embodiments the delivery is via an AAV. The dosage may be adjusted to balance the therapeutic benefit against any side effects.

[0454] In some embodiments, a Poxvirus is used in the presently described composition. These include orthopoxvirus, avipox, vaccinia, MVA, NYVAC, canarypox, ALVAC, fowlpox, TROVAC, etc. (see e.g., Verardi et al., Hum. Vaccin. Immunother. 2012 July; 8(7):961-70; and Moss, Vaccine. 2013; 31(39): 4220-4222). Poxvirus expression vectors were described in 1982 and quickly became widely used for vaccine development as well as research in numerous fields. Advantages of the vectors include simple construction, ability to accommodate large amounts of foreign DNA and high expression levels. Information concerning poxviruses that may be used in the practice of the present disclosure, such as Chordopoxvirinae subfamily poxviruses (poxviruses of vertebrates), for instance, orthopoxviruses and avipoxviruses, e.g., vaccinia virus (e.g., Wyeth Strain, WR Strain (e.g., ATCC® VR-1354), Copenhagen Strain, NYVAC, NYVAC.1, NYVAC.2, MVA, MVA-BN), canarypox virus (e.g., Wheatley C93 Strain, ALVAC), fowlpox virus (e.g., FP9 Strain, Webster Strain, TROVAC), dovepox, pigeonpox, quailpox, and raccoon pox, inter alia, synthetic or non-naturally occurring recombinants thereof, uses thereof, and methods for making and using such recombinants may be found in scientific and patent literature.

[0455] In some embodiments, the vaccinia virus is used in the disease vaccine or immunogenic composition to express an antigen. (Rolph et al., Recombinant viruses as vaccines and immunological tools. Curr. Opin. Immunol. 9:517-524, 1997). The recombinant vaccinia virus is able to replicate within the cytoplasm of the infected host cell and the polypeptide of interest can therefore induce an immune response. Moreover, Poxviruses have been widely used as vaccine or immunogenic composition vectors because of their ability to target encoded antigens for processing by the major histocompatibility complex class I pathway by directly infecting immune cells, in particular antigen-presenting cells, but also due to their ability to self-adjuvant.

[0456] In some embodiments, ALVAC is used as a vector in a disease vaccine or immunogenic composition. ALVAC is a canarypox virus that can be modified to express foreign transgenes and has been used as a method for vaccination against both prokaryotic and eukaryotic antigens (Hong H, Lee D S, Conkright W, et al. Phase I clinical trial of a recombinant canarypoxvirus (ALVAC) vaccine expressing human carcinoembryonic antigen and the B7.1 co-stimulatory molecule. Cancer Immunol. Immunother. 2000; 49:504-14; von Mehren M, Arlen P, Tsang K Y, et al. Pilot study of a dual gene recombinant avipox vaccine containing both carcinoembryonic antigen (CEA) and B7.1 transgenes in patients with recurrent CEA-expressing adenocarcinomas. Clin. Cancer. Res. 2000; 6:2219-28; Musey L, Ding Y, Elizaga M, et al. HIV-1 vaccination administered intramuscularly can induce both systemic and mucosal T cell immunity in HIV-1-uninfected individuals. J. Immunol. 2003; 171:1094-101; Paoletti E. Applications of pox virus vectors to vaccination: an update. Proc. Natl. Acad. Sci. USA 1996; 93:11349-53; U.S. Pat. No. 7,255,862). In a phase I clinical trial, an ALVAC virus expressing the tumor antigen CEA showed an excellent safety profile and resulted in increased CEA-specific T cell responses in selected patients; objective clinical responses, however, were not observed (Marshall J L, Hawkins M J, Tsang K Y, et al. Phase I study in cancer patients of a replication-defective avipox recombinant vaccine that expresses human carcinoembryonic antigen. J. Clin. Oncol. 1999; 17:332-7).

[0457] In some embodiments, a Modified Vaccinia Ankara (MVA) virus may be used as a viral vector for an antigen vaccine or immunogenic composition. MVA is a member of the Orthopoxvirus family and has been generated by about 570 serial passages on chicken embryo fibroblasts of the Ankara strain of Vaccinia virus (CVA) (see, e.g., Mayr, A., et al., Infection 3, 6-14, 1975). As a consequence of these passages, the resulting MVA virus contains 31 kilobases less genomic information compared to CVA, and is highly host cell restricted (Meyer, H. et al., J. Gen. Virol. 72, 1031-1038, 1991). MVA is characterized by its extreme attenuation, namely, by a diminished virulence or infectious ability, but still holds an excellent immunogenicity. When tested in a variety of animal models, MVA was proven to be avirulent, even in immuno-suppressed individuals. Moreover, MVA-BN®-HER2 is a candidate immunotherapy designed for the treatment of HER-2-positive breast cancer and is currently in clinical trials. (Mandl et al., Cancer Immunol. Immunother. January 2012; 61(1): 19-29). Methods to make and use recombinant MVA has been described (e.g., see U.S. Pat. Nos. 8,309,098 and 5,185,146 hereby incorporated in its entirety).

[0458] Suitable host cells for expression of a polypeptide include prokaryotes, yeast, insect or higher eukaryotic cells under the control of appropriate promoters. Prokaryotes include gram negative or gram positive organisms, for example E. coli or bacilli. Higher eukaryotic cells include established cell lines of mammalian origin. Cell-free translation systems could also be employed. Appropriate cloning and expression vectors for use with bacterial, fungal, yeast, and mammalian cellular hosts are well known in the art (see Pouwels et al., Cloning Vectors: A Laboratory Manual, Elsevier, N.Y., 1985).

[0459] Various mammalian or insect cell culture systems are also advantageously employed to express recombinant protein. Expression of recombinant proteins in mammalian cells can be performed because such proteins are generally correctly folded, appropriately modified and completely functional. Examples of suitable mammalian host cell lines include the COS-7 lines of monkey kidney cells, described by Gluzman (Cell 23:175, 1981), and other cell lines capable of expressing an appropriate vector including, for example, L cells, C127, 3T3, Chinese hamster ovary (CHO), 293, HeLa and BHK cell lines. Mammalian expression vectors can comprise nontranscribed elements such as an origin of replication, a suitable promoter and enhancer linked to the gene to be expressed, and other 5′ or 3′ flanking nontranscribed sequences, and 5′ or 3′ nontranslated sequences, such as necessary ribosome binding sites, a polyadenylation site, splice donor and acceptor sites, and transcriptional termination sequences. Baculovirus systems for production of heterologous proteins in insect cells are reviewed by Luckow and Summers, Bio/Technology 6:47 (1988).

[0460] Host cells are genetically engineered (transduced or transformed or transfected) with the vectors which can be, for example, a cloning vector or an expression vector. The vector can be, for example, in the form of a plasmid, a viral particle, a phage, etc. The engineered host cells can be cultured in conventional nutrient media modified as appropriate for activating promoters, selecting transformants or amplifying the polynucleotides. The culture conditions, such as temperature, pH and the like, are those previously used with the host cell selected for expression, and will be apparent to the ordinarily skilled artisan.

[0461] As representative examples of appropriate hosts, there can be mentioned: bacterial cells, such as E. coli, Bacillus subtilis, Salmonella typhimurium and various species within the genera Pseudomonas, Streptomyces, and Staphylococcus; fungal cells, such as yeast; insect cells such as Drosophila and Sf9; animal cells such as COS-7 lines of monkey kidney fibroblasts, described by Gluzman, Cell 23:175 (1981), and other cell lines capable of expressing a compatible vector, for example, the C127, 3T3, CHO, HeLa and BHK cell lines or Bowes melanoma; plant cells, etc. The selection of an appropriate host is deemed to be within the scope of those skilled in the art from the teachings herein.

[0462] Yeast, insect or mammalian cell hosts can also be used, employing suitable vectors and control sequences. Examples of mammalian expression systems include the COS-7 lines of monkey kidney fibroblasts, described by Gluzman, Cell 23:175 (1981), and other cell lines capable of expressing a compatible vector, for example, the C127, 3T3, CHO, HeLa and BHK cell lines.

[0463] Polynucleotides described herein can be administered and expressed in human cells (e.g., immune cells, including dendritic cells). A human codon usage table can be used to guide the codon choice for each amino acid. Such polynucleotides comprise spacer amino acid residues between epitopes and/or analogs, such as those described above, or can comprise naturally-occurring flanking sequences adjacent to the epitopes and/or analogs (and/or CTL (e.g., CD8⁺), Th (e.g., CD4⁺), and B cell epitopes).

[0464] Standard regulatory sequences well known to those of skill in the art can be included in the vector to ensure expression in the human target cells. Several vector elements are desirable: a promoter with a downstream cloning site for polynucleotide, e.g., minigene insertion; a polyadenylation signal for efficient transcription termination; an E. coli origin of replication; and an E. coli selectable marker (e.g. ampicillin or kanamycin resistance). Numerous promoters can be used for this purpose, e.g., the human cytomegalovirus (hCMV) promoter. See, e.g., U.S. Pat. Nos. 5,580,859 and 5,589,466 for other suitable promoter sequences. In some embodiments, the promoter is the CMV-IE promoter.

[0465] Useful expression vectors for eukaryotic hosts, especially mammals or humans include, for example, vectors comprising expression control sequences from SV40, bovine papilloma virus, adenovirus and cytomegalovirus. Useful expression vectors for bacterial hosts include known bacterial plasmids, such as plasmids from Escherichia coli, including pCR1, pBR322, pMB9 and their derivatives, wider host range plasmids, such as M13 and filamentous single-stranded DNA phages.

[0466] Vectors may be introduced into animal tissues by a number of different methods. The two most popular approaches are injection of DNA in saline, using a standard hypodermic needle, and gene gun delivery. A schematic outline of the construction of a DNA vaccine plasmid and its subsequent delivery by these two methods into a host is illustrated at Scientific American (Weiner et al., (1999) Scientific American 281 (1): 34-41). Injection in saline is normally conducted intramuscularly (IM) in skeletal muscle, or intradermally (ID), with DNA being delivered to the extracellular spaces. This can be assisted by electroporation by temporarily damaging muscle fibers with myotoxins such as bupivacaine; or by using hypertonic solutions of saline or sucrose (Alarcon et al., (1999). Adv. Parasitol. Advances in Parasitology 42: 343-410). Immune responses to this method of delivery can be affected by many factors, including needle type, needle alignment, speed of injection, volume of injection, muscle type, and age, sex and physiological condition of the animal being injected (Alarcon et al., (1999). Adv. Parasitol. Advances in Parasitology 42: 343-410).

[0467] Gene gun delivery, the other commonly used method of delivery, ballistically accelerates plasmid DNA (pDNA) that has been adsorbed onto gold or tungsten microparticles into the target cells, using compressed helium as an accelerant (Alarcon et al., (1999). Adv. Parasitol. Advances in Parasitology 42: 343-410; Lewis et al., (1999). Advances in Virus Research (Academic Press) 54: 129-88).

[0468] Alternative delivery methods may include aerosol instillation of naked DNA on mucosal surfaces, such as the nasal and lung mucosa, (Lewis et al., (1999). Advances in Virus Research (Academic Press) 54: 129-88) and topical administration of pDNA to the eye and vaginal mucosa (Lewis et al., (1999) Advances in Virus Research (Academic Press) 54: 129-88). Mucosal surface delivery has also been achieved using cationic liposome-DNA preparations, biodegradable microspheres, attenuated Shigella or Listeria vectors for oral administration to the intestinal mucosa, and recombinant adenovirus vectors. DNA or RNA may also be delivered to cells following mild mechanical disruption of the cell membrane, temporarily permeabilizing the cells. Such a mild mechanical disruption of the membrane can be accomplished by gently forcing cells through a small aperture (Sharei et al., Ex Vivo Cytosolic Delivery of Functional Macromolecules to Immune Cells, PLOS ONE (2015)).

[0469] Chemical means for introducing a polynucleotide into a host cell include colloidal dispersion systems, such as macromolecule complexes, nanocapsules, microspheres, beads, and lipid-based systems including oil-in-water emulsions, micelles, mixed micelles, and liposomes. An exemplary colloidal system for use as a delivery vehicle in vitro and in vivo is a liposome (e.g., an artificial membrane vesicle). In the case where a non-viral delivery system is utilized, an exemplary delivery vehicle is a liposome. “Liposome” is a generic term encompassing a variety of single and multilamellar lipid vehicles formed by the generation of enclosed lipid bilayers or aggregates. Liposomes can be characterized as having vesicular structures with a phospholipid bilayer membrane and an inner aqueous medium. Multilamellar liposomes have multiple lipid layers separated by aqueous medium. They form spontaneously when phospholipids are suspended in an excess of aqueous solution. The lipid components undergo self-rearrangement before the formation of closed structures and entrap water and dissolved solutes between the lipid bilayers (Ghosh et al., Glycobiology 5: 505-10 (1991)). However, compositions that have different structures in solution than the normal vesicular structure are also encompassed. For example, the lipids may assume a micellar structure or merely exist as nonuniform aggregates of lipid molecules. Also contemplated are lipofectamine-nucleic acid complexes.

[0470] The use of lipid formulations is contemplated for the introduction of the nucleic acids into a host cell (in vitro, ex vivo or in vivo). In another aspect, the nucleic acid may be associated with a lipid. The nucleic acid associated with a lipid may be encapsulated in the aqueous interior of a liposome, interspersed within the lipid bilayer of a liposome, attached to a liposome via a linking molecule that is associated with both the liposome and the oligonucleotide, entrapped in a liposome, complexed with a liposome, dispersed in a solution containing a lipid, mixed with a lipid, combined with a lipid, contained as a suspension in a lipid, contained or complexed with a micelle, or otherwise associated with a lipid. Lipid, lipid/DNA or lipid/expression vector associated compositions are not limited to any particular structure in solution. For example, they may be present in a bilayer structure, as micelles, or with a “collapsed” structure. They may also simply be interspersed in a solution, possibly forming aggregates that are not uniform in size or shape. Lipids are fatty substances which may be naturally occurring or synthetic lipids. For example, lipids include the fatty droplets that naturally occur in the cytoplasm as well as the class of compounds which contain long-chain aliphatic hydrocarbons and their derivatives, such as fatty acids, alcohols, amines, amino alcohols, and aldehydes.

[0471] Lipids suitable for use can be obtained from commercial sources. For example, dimyristyl phosphatidylcholine (“DMPC”) can be obtained from Sigma, St. Louis, Mo.; dicetyl phosphate (“DCP”) can be obtained from K & K Laboratories (Plainview, N.Y.); cholesterol (“Choi”) can be obtained from Calbiochem-Behring; dimyristyl phosphatidylglycerol (“DMPG”) and other lipids may be obtained from Avanti Polar Lipids, Inc. (Birmingham, Ala.). Stock solutions of lipids in chloroform or chloroform/methanol can be stored at about −20° C. Chloroform is used as the only solvent since it is more readily evaporated than methanol.

[0472] In some embodiments, a vector comprises a polynucleotide encoding a first peptide comprising a first neoepitope and a second peptide comprising a second neoepitope. In some embodiments, the first and second peptides are derived from the same protein. The at least two distinct peptides may vary by length, amino acid sequence or both. The peptides are derived from any protein known to or have been found to contain a tumor specific mutation. In some embodiments, a vector comprises a first peptide comprising a first neoepitope of a protein and a second peptide comprising a second neoepitope of the same protein, wherein the first peptide is different from the second peptide, and wherein the first neoepitope comprises a mutation and the second neoepitope comprises the same mutation. In some embodiments, a vector comprises a first peptide comprising a first neoepitope of a first region of a protein and a second peptide comprising a second neoepitope of a second region of the same protein, wherein the first region comprises at least one amino acid of the second region, wherein the first peptide is different from the second peptide and wherein the first neoepitope comprises a first mutation and the second neoepitope comprises a second mutation. In some embodiments, the first mutation and the second mutation are the same. In some embodiments, the mutation is selected from the group consisting of a point mutation, a splice-site mutation, a frameshift mutation, a read-through mutation, a gene fusion mutation and any combination thereof.

[0473] In some embodiments, a vector comprises a polynucleotide operably linked to a promoter. In some embodiments, the vector is a self-amplifying RNA replicon, plasmid, phage, transposon, cosmid, virus, or virion. In some embodiments, the vector is derived from a retrovirus, lentivirus, adenovirus, adeno-associated virus, herpes virus, pox virus, alpha virus, vaccinia virus, hepatitis B virus, human papillomavirus or a pseudotype thereof. In some embodiments, the vector is a non-viral vector. In some embodiments, the non-viral vector is a nanoparticle, a cationic lipid, a cationic polymer, a metallic nanopolymer, a nanorod, a liposome, a micelle, a microbubble, a cell-penetrating peptide, or a liposphere.

### T Cell Receptors

[0474] In one aspect, the present disclosure provides cells expressing a neoantigen-recognizing receptor that activates an immunoresponsive cell (e.g., T cell receptor (TCR) or chimeric antigen receptor (CAR)), and methods of using such cells for the treatment of a disease that requires an enhanced immune response. Such cells include genetically modified immunoresponsive cells (e.g., T cells, Natural Killer (NK) cells, cytotoxic T lymphocytes (CTL (e.g., CD8⁺)) cells, helper T lymphocyte (Th (e.g., CD4⁺)) cells) expressing an antigen-recognizing receptor (e.g., TCR or CAR) that binds one of the neoantigenic peptides described herein, and methods of use therefore for the treatment of neoplasia and other pathologies where an increase in an antigen-specific immune response is desired. T cell activation is mediated by a TCR or a CAR targeted to an antigen.

[0475] The present disclosure provides cells expressing a combination of an antigen-recognizing receptor that activates an immunoresponsive cell (e.g., TCR, CAR) and a chimeric co-stimulating receptor (CCR), and methods of using such cells for the treatment of a disease that requires an enhanced immune response. In some embodiments, tumor antigen-specific T cells, NK cells, CTL cells or other immunoresponsive cells are used as shuttles for the selective enrichment of one or more co-stimulatory ligands for the treatment or prevention of neoplasia. Such cells are administered to a human subject in need thereof for the treatment or prevention of a particular cancer.

[0476] In some embodiments, the tumor antigen-specific human lymphocytes that can be used in the methods of the present disclosure include, without limitation, peripheral donor lymphocytes genetically modified to express chimeric antigen receptors (CARs) (Sadelain, M., et al. 2003 Nat Rev Cancer 3:35-45), peripheral donor lymphocytes genetically modified to express a full-length tumor antigen-recognizing T cell receptor complex comprising the a and p heterodimer (Morgan, R. A., et al. 2006 Science 314:126-129), lymphocyte cultures derived from tumor infiltrating lymphocytes (TILs) in tumor biopsies (Panelli, M. C., et al. 2000 J Immunol 164:495-504; Panelli, M. C., et al. 2000 J Immunol 164:4382-4392), and selectively in vitro-expanded antigen-specific peripheral blood leukocytes employing artificial antigen-presenting cells (AAPCs) or pulsed dendritic cells (Dupont, J., et al. 2005 Cancer Res 65:5417-5427; Papanicolaou, G. A., et al. 2003 Blood 102:2498-2505). The T cells may be autologous, allogeneic, or derived in vitro from engineered progenitor or stem cells.

[0477] In some embodiments, the immunotherapeutic is an engineered receptor. In some embodiments, the engineered receptor is a chimeric antigen receptor (CAR), a T cell receptor (TCR), or a B-cell receptor (BCR), an adoptive T cell therapy (ACT), or a derivative thereof. In other aspects, the engineered receptor is a chimeric antigen receptor (CAR). In some aspects, the CAR is a first generation CAR. In other aspects, the CAR is a second generation CAR. In still other aspects, the CAR is a third generation CAR. In some aspects, the CAR comprises an extracellular portion, a transmembrane portion, and an intracellular portion. In some aspects, the intracellular portion comprises at least one T cell co-stimulatory domain. In some aspects, the T cell co-stimulatory domain is selected from the group consisting of CD27, CD28, TNFRS9 (4-1BB), TNFRSF4 (OX40), TNFRSF8 (CD30), CD40LG (CD40L), ICOS, ITGB2 (LFA-1), CD2, CD7, KLRC2 (NKG2C), TNFRS18 (GITR), TNFRSF14 (HVEM), or any combination thereof.

[0478] In some aspects, the engineered receptor binds a target. In some aspects, the binding is specific to a peptide specific to one or more subjects suffering from a disease or condition.

[0479] In some aspects, the immunotherapeutic is a cell as described in detail herein. In some aspects, the immunotherapeutic is a cell comprising a receptor that specifically binds a peptide or neoepitope described herein. In some aspects, the immunotherapeutic is a cell used in combination with the peptides/nucleic acids of the present disclosure. In some embodiments, the cell is a patient cell. In some embodiments, the cell is a T cell. In some embodiments, the cell is tumor infiltrating lymphocyte.

[0480] In some aspects, a subject with a condition or disease is treated based on a T cell receptor repertoire of the subject. In some embodiments, a peptide or neoepitope is selected based on a T cell receptor repertoire of the subject. In some embodiments, a subject is treated with T cells expressing TCRs specific to a peptide or neoepitope as described herein. In some embodiments, a subject is treated with a peptide or neoepitope specific to TCRs, e.g., subject specific TCRs. In some embodiments, a subject is treated with a peptide or neoepitope specific to T cells expressing TCRs, e.g., subject specific TCRs. In some embodiments, a subject is treated with a peptide or neoepitope specific to subject specific TCRs.

[0481] In some embodiments, the composition as described herein is selected based on TCRs identified in one or more subjects. In some embodiments, identification of a T cell repertoire and testing in functional assays is used to determine the composition to be administered to one or more subjects with a condition or disease. In some embodiments, the composition is an antigen vaccine comprising one or more peptides or proteins as described herein. In some embodiments, the vaccine comprises subject specific neoantigenic peptides. In some embodiments, the peptides to be included in the vaccine are selected based on a quantification of subject specific TCRs that bind to the neoepitopes. In some embodiments, the peptides are selected based on a binding affinity of the peptide to a TCR. In some embodiments, the selecting is based on a combination of both the quantity and the binding affinity. For example, a TCR that binds strongly to a neoepitope in a functional assay, but that is not highly represented in a TCR repertoire may be a good candidate for an antigen vaccine because T cells expressing the TCR would be advantageously amplified.

[0482] In some embodiments, the peptide or protein is selected for administering to one or more subjects based on binding to TCRs. In some embodiments, T cells, such as T cells from a subject with a disease or condition, can be expanded. Expanded T cells that express TCRs specific to a neoantigenic peptide or neoepitope can be administered back to a subject. In some embodiments, suitable cells, e.g., PBMCs, are transduced or transfected with polynucleotides for expression of TCRs specific to a neoantigenic peptide or neoepitope and administered to a subject. T cells expressing TCRs specific to a neoantigenic peptide or neoepitope can be expanded and administered back to a subject. In some embodiments, T cells that express TCRs specific to a neoantigenic peptide or neoepitope that result in cytolytic activity when incubated with autologous diseased tissue can be expanded and administered to a subject. In some embodiments, T cells used in functional assays result in binding to a neoantigenic peptide or neoepitope can be expanded and administered to a subject. In some embodiments, TCRs that have been determined to bind to subject specific neoantigenic peptides or neoepitopes can be expressed in T cells and administered to a subject.

[0483] In an embodiment, the present disclosure provides a composition comprising a first peptide comprising a first neoepitope and a second peptide comprising a second neoepitope, wherein the first peptide is different from the second peptide, and wherein the first neoepitope comprises a mutation and the second neoepitope comprises the same mutation. In some embodiments, the composition as provided herein comprises a first T cell comprising a first T cell receptor (TCR) specific for the first neoepitope and a second T cell comprising a second TCR specific for the second neoepitope. In some embodiments, the first and second peptides are derived from the same protein.

[0484] In another embodiment, the present disclosure provides a composition comprising a first peptide comprising a first neoepitope of a first region of a protein and a second peptide comprising a second neoepitope of a second region of the same protein, wherein the first region comprises at least one amino acid of the second region, wherein the first peptide is different from the second peptide and wherein the first neoepitope comprises a first mutation and the second neoepitope comprises a second mutation. In some embodiments, the composition as provided herein comprises a first T cell comprising a first T cell receptor (TCR) specific for the first neoepitope and a second T cell comprising a second TCR specific for the second neoepitope. In some embodiments, the first mutation and the second mutation are the same.

[0485] In some embodiments, the first neoepitope binds to a class I HLA protein to form a class I HLA-peptide complex. In some embodiments, the first neoepitope binds to a class II HLA protein to form a class II HLA-peptide complex. In some embodiments, the second neoepitope binds to a class II HLA a protein to form a class II HLA-peptide complex. In some embodiments, the second neoepitope binds to a class I HLA protein to form a class I HLA-peptide complex. In some embodiments, the first neoepitope activates CD8⁺ T cells. In some embodiments, the first neoepitope activates CD4⁺ T cells. In some embodiments, the second neoepitope activates CD4⁺ T cells. In some embodiments, the second neoepitope activates CD8⁺ T cells. In some embodiments, a TCR of a CD4⁺ T cell binds to a class II HLA-peptide complex. In some embodiments, a TCR of a CD8⁺ T cell binds to a class II HLA-peptide complex. In some embodiments, a TCR of a CD8⁺ T cell binds to a class I HLA-peptide complex. In some embodiments, a TCR of a CD4⁺ T cell binds to a class I HLA-peptide complex.

[0486] In some embodiments, the first TCR is a first chimeric antigen receptor specific for the first neoepitope and the second TCR is a second chimeric antigen receptor specific for the second neoepitope. In some embodiments, the first T cell is a cytotoxic T cell. In some embodiments, the first T cell is a gamma delta T cell. In some embodiments, the second T cell is a helper T cell. In some embodiments, the first and/or second TCR binds to an HLA-peptide complex with a K_{D} or an IC₅₀ of less than 1,000 nM, 900 nM, 800 nM, 700 nM, 600 nM, 500 nM, 250 nM, 150 nM, 100 nM, 50 nM, 25 nM or 10 nM. In some embodiments, the first and/or second TCR binds to an HLA class I-peptide complex with a K_{D} or an IC₅₀ of less than 1,000 nM, 900 nM, 800 nM, 700 nM, 600 nM, 500 nM, 250 nM, 150 nM, 100 nM, 50 nM, 25 nM or 10 nM. In some embodiments, the first and/or second TCR binds to an HLA class II-peptide complex with a K_{D} or an IC₅₀ of less than 2,000, 1,500, 1,000 nM, 900 nM, 800 nM, 700 nM, 600 nM, 500 nM, 250 nM, 150 nM, 100 nM, 50 nM, 25 nM or 10 nM.

### Antigen Presenting Cells

[0487] The neoantigenic peptide or protein can be provided as antigen presenting cells (e.g., dendritic cells) containing such peptides, proteins or polynucleotides as described herein. In other embodiments, such antigen presenting cells are used to stimulate T cells for use in patients. Thus, one embodiment of the present disclosure is a composition containing at least one antigen presenting cell (e.g., a dendritic cell) that is pulsed or loaded with one or more neoantigenic peptides or polynucleotides described herein. In some embodiments, such APCs are autologous (e.g., autologous dendritic cells). Alternatively, peripheral blood mononuclear cells (PBMCs) isolated from a patient can be loaded with neoantigenic peptides or polynucleotides ex vivo. In related embodiments, such APCs or PBMCs are injected back into the patient. In some embodiments, the antigen presenting cells are dendritic cells. In related embodiments, the dendritic cells are autologous dendritic cells that are pulsed with the neoantigenic peptide or nucleic acid. The neoantigenic peptide can be any suitable peptide that gives rise to an appropriate T cell response. T cell therapy using autologous dendritic cells pulsed with peptides from a tumor associated antigen is disclosed in Murphy et al. (1996) The Prostate 29, 371-380 and Tjua et al. (1997) The Prostate 32, 272-278. In some embodiments, the T cell is a CTL (e.g., CD8⁺). In some embodiments, the T cell is a helper T lymphocyte (Th (e.g., CD4⁺)).

[0488] In some embodiments, the present disclosure provides a composition comprising a cell-based immunogenic pharmaceutical composition that can also be administered to a subject. For example, an antigen presenting cell (APC) based immunogenic pharmaceutical composition can be formulated using any of the well-known techniques, carriers, and excipients as suitable and as understood in the art. APCs include monocytes, monocyte-derived cells, macrophages, and dendritic cells. Sometimes, an APC based immunogenic pharmaceutical composition can be a dendritic cell-based immunogenic pharmaceutical composition.

[0489] A dendritic cell-based immunogenic pharmaceutical composition can be prepared by any methods well known in the art. In some cases, dendritic cell-based immunogenic pharmaceutical compositions can be prepared through an ex vivo or in vivo method. The ex vivo method can comprise the use of autologous DCs pulsed ex vivo with the polypeptides described herein, to activate or load the DCs prior to administration into the patient. The in vivo method can comprise targeting specific DC receptors using antibodies coupled with the polypeptides described herein. The DC-based immunogenic pharmaceutical composition can further comprise DC activators such as TLR3, TLR-7-8, and CD40 agonists. The DC-based immunogenic pharmaceutical composition can further comprise adjuvants, and a pharmaceutically acceptable carrier.

[0490] Antigen presenting cells (APCs) can be prepared from a variety of sources, including human and non-human primates, other mammals, and vertebrates. In certain embodiments, APCs can be prepared from blood of a human or non-human vertebrate. APCs can also be isolated from an enriched population of leukocytes. Populations of leukocytes can be prepared by methods known to those skilled in the art. Such methods typically include collecting heparinized blood, apheresis or leukopheresis, preparation of buffy coats, rosetting, centrifugation, density gradient centrifugation (e.g., using Ficoll, colloidal silica particles, and sucrose), differential lysis non-leukocyte cells, and filtration. A leukocyte population can also be prepared by collecting blood from a subject, defibrillating to remove the platelets and lysing the red blood cells. The leukocyte population can optionally be enriched for monocytic dendritic cell precursors.

[0491] Blood cell populations can be obtained from a variety of subjects, according to the desired use of the enriched population of leukocytes. The subject can be a healthy subject. Alternatively, blood cells can be obtained from a subject in need of immunostimulation, such as, for example, a cancer patient or other patient for which immunostimulation will be beneficial. Likewise, blood cells can be obtained from a subject in need of immune suppression, such as, for example, a patient having an autoimmune disorder (e.g., rheumatoid arthritis, diabetes, lupus, multiple sclerosis, and the like). A population of leukocytes also can be obtained from an HLA-matched healthy individual.

[0492] When blood is used as a source of APC, blood leukocytes may be obtained using conventional methods that maintain their viability. According to one aspect of the present disclosure, blood can be diluted into medium that may or may not contain heparin or other suitable anticoagulant. The volume of blood to medium can be about 1 to 1. Cells can be concentrated by centrifugation of the blood in medium at about 1,000 rpm (150 g) at 4° C. Platelets and red blood cells can be depleted by resuspending the cells in any number of solutions known in the art that will lyse erythrocytes, for example ammonium chloride. For example, the mixture may be medium and ammonium chloride at about 1:1 by volume. Cells may be concentrated by centrifugation and washed in the desired solution until a population of leukocytes, substantially free of platelets and red blood cells, is obtained. Any isotonic solution commonly used in tissue culture may be used as the medium for separating blood leukocytes from platelets and red blood cells. Examples of such isotonic solutions can be phosphate buffered saline, Hanks balanced salt solution, and complete growth media. APCs and/or APC precursor cells may also purified by elutriation.

[0493] In one embodiment, the APCs can be non-nominal APCs under inflammatory or otherwise activated conditions. For example, non-nominal APCs can include epithelial cells stimulated with interferon-gamma, T cells, B cells, and/or monocytes activated by factors or conditions that induce APC activity. Such non-nominal APCs can be prepared according to methods known in the art.

[0494] The APCs can be cultured, expanded, differentiated and/or, matured, as desired, according to the according to the type of APC. The APCs can be cultured in any suitable culture vessel, such as, for example, culture plates, flasks, culture bags, and bioreactors.

[0495] In certain embodiments, APCs can be cultured in suitable culture or growth medium to maintain and/or expand the number of APCs in the preparation. The culture media can be selected according to the type of APC isolated. For example, mature APCs, such as mature dendritic cells, can be cultured in growth media suitable for their maintenance and expansion. The culture medium can be supplemented with amino acids, vitamins, antibiotics, divalent cations, and the like. In addition, cytokines, growth factors and/or hormones, can be included in the growth media. For example, for the maintenance and/or expansion of mature dendritic cells, cytokines, such as granulocyte/macrophage colony stimulating factor (GM-CSF) and/or interleukin 4 (IL-4), can be added. In other embodiments, immature APCs can be cultured and/or expanded. Immature dendritic cells can they retain the ability to uptake target mRNA and process new antigen. In some embodiments, immature dendritic cells can be cultured in media suitable for their maintenance and culture. The culture medium can be supplemented with amino acids, vitamins, antibiotics, divalent cations, and the like. In addition, cytokines, growth factors and/or hormones, can be included in the growth media.

[0496] Other immature APCs can similarly be cultured or expanded. Preparations of immature APCs can be matured to form mature APCs. Maturation of APCs can occur during or following exposure to the neoantigenic peptides. In certain embodiments, preparations of immature dendritic cells can be matured. Suitable maturation factors include, for example, cytokines TNF-α, bacterial products (e.g., BCG), and the like. In another aspect, isolated APC precursors can be used to prepare preparations of immature APCs. APC precursors can be cultured, differentiated, and/or matured. In certain embodiments, monocytic dendritic cell precursors can be cultured in the presence of suitable culture media supplemented with amino acids, vitamins, cytokines, and/or divalent cations, to promote differentiation of the monocytic dendritic cell precursors to immature dendritic cells. In some embodiments, the APC precursors are isolated from PBMCs. The PBMCs can be obtained from a donor, for example, a human donor, and can be used freshly or frozen for future usage. In some embodiments, the APC is prepared from one or more APC preparations. In some embodiments, the APC comprises an APC loaded with the first and second neoantigenic peptides comprising the first and second neoepitopes or polynucleotides encoding the first and second neoantigenic peptides comprising the first and second neoepitopes. In some embodiments, the APC is an autologous APC, an allogenic APC, or an artificial APC.

[0497] In an embodiment, the present disclosure provides a composition comprising an APC comprising a first peptide comprising a first neoepitope and a second peptide comprising a second neoepitope, wherein the first peptide is different from the second peptide, and wherein the first neoepitope comprises a mutation and the second neoepitope comprises the same mutation. In some embodiments, the first and second peptides are derived from the same protein. In another embodiment, the present disclosure provides a composition comprising an APC comprising a first peptide comprising a first neoepitope of a first region of a protein and a second peptide comprising a second neoepitope of a second region of the same protein, wherein the first region comprises at least one amino acid of the second region, wherein the first peptide is different from the second peptide and wherein the first neoepitope comprises a first mutation and the second neoepitope comprises a second mutation. In some embodiments, the first mutation and the second mutation are the same.

### Adjuvants

[0498] An adjuvant can be used to enhance the immune response (humoral and/or cellular) elicited in a patient receiving a composition as provided herein. Sometimes, adjuvants can elicit a Th1-type response. Other times, adjuvants can elicit a Th2-type response. A Th1-type response can be characterized by the production of cytokines such as IFN-γ as opposed to a Th2-type response which can be characterized by the production of cytokines such as IL-4, IL-5 and IL-10.

[0499] In some aspects, lipid-based adjuvants, such as MPLA and MDP, can be used with the immunogenic pharmaceutical compositions disclosed herein. Monophosphoryl lipid A (MPLA), for example, is an adjuvant that causes increased presentation of liposomal antigen to specific T Lymphocytes. In addition, a muramyl dipeptide (MDP) can also be used as a suitable adjuvant in conjunction with the immunogenic pharmaceutical formulations described herein.

[0500] Suitable adjuvants are known in the art (see, WO 2015/095811) and include, but are not limited to poly(I:C), poly-ICLC, Hiltonol, STING agonist, 1018 ISS, aluminum salts, Amplivax, AS15, BCG, CP-870,893, CpG7909, CyaA, dSLIM, GM-CSF, IC30, IC31, Imiquimod, ImuFact IMP321, IS Patch, ISS, ISCOMATRIX, JuvImmune, LipoVac, MF59, monophosphoryl lipid A, Montanide IMS 1312, Montanide ISA 206, Montanide ISA 50V, Montanide ISA-51, OK-432, OM-174, OM-197-MP-EC, ONTAK, PepTel®. vector system, PLG microparticles, resiquimod, SRL172, virosomes and other virus-like particles, YF-17D, VEGF trap, R848, beta-glucan, Pam3Cys, Pam3CSK4, Aquila's QS21 stimulon (Aquila Biotech, Worcester, Mass., USA) which is derived from saponin, mycobacterial extracts and synthetic bacterial cell wall mimics, and other proprietary adjuvants such as Ribi's Detox. Quil or Superfos. Adjuvants also include incomplete Freund's or GM-CSF. Several immunological adjuvants (e.g., MF59) specific for dendritic cells and their preparation have been described previously (Dupuis M, et al., Cell Immunol. 1998; 186(1):18-27; Allison A C; Dev. Biol. Stand. 1998; 92:3-11) (Mosca et al. Frontiers in Bioscience, 2007; 12:4050-4060) (Gamvrellis et al. Immunol & Cell Biol. 2004; 82: 506-516). Also cytokines can be used. Several cytokines have been directly linked to influencing dendritic cell migration to lymphoid tissues (e.g., TNF-alpha), accelerating the maturation of dendritic cells into efficient antigen-presenting cells for T-lymphocytes (e.g., GM-CSF, PGE1, PGE2, IL-1, IL-1b, IL-4, IL-6 and CD40L) (U.S. Pat. No. 5,849,589 incorporated herein by reference in its entirety) and acting as immunoadjuvants (e.g., IL-12) (Gabrilovich D I, et al., J. Immunother. Emphasis Tumor Immunol. 1996 (6):414-418).

[0501] Adjuvant can also comprise stimulatory molecules such as cytokines. Non-limiting examples of cytokines include: CCL20, α-interferon (IFN-α), β-interferon (IFN-β), γ-interferon, platelet derived growth factor (PDGF), TNFα, TNFβ (lymphotoxin alpha (LTα)), GM-CSF, epidermal growth factor (EGF), cutaneous T cell-attracting chemokine (CTACK), epithelial thymus-expressed chemokine (TECK), mucosae-associated epithelial chemokine (MEC), IL-12, IL-15, IL-28, MHC, CD80, CD86, IL-1, IL-2, IL-4, IL-5, IL-6, IL-10, IL-18, MCP-1, MIP-la, MIP-1-, IL-8, L-selectin, P-selectin, E-selectin, CD34, GlyCAM-1, MadCAM-1, LFA-1, VLA-1, Mac-1, p150.95, PECAM, ICAM-1, ICAM-2, ICAM-3, CD2, LFA-3, M-CSF, G-CSF, mutant forms of IL-18, CD40, CD40L, vascular growth factor, fibroblast growth factor, IL-7, nerve growth factor, vascular endothelial growth factor, Fas, TNF receptor, Fit, Apo-1, p55, WSL-1, DR3, TRAMP, Apo-3, AIR, LARD, NGRF, DR4, DRS, KILLER, TRAIL-R2, TRICK2, DR6, Caspase ICE, Fos, c-jun, Sp-1, Ap-1, Ap-2, p38, p65Rel, MyD88, IRAK, TRAF6, IκB, Inactive NIK, SAP K, SAP-I, JNK, interferon response genes, NFκB, Bax, TRAIL, TRAILrec, TRAILrecDRC5, TRAIL-R3, TRAIL-R4, RANK, RANK LIGAND, Ox40, Ox40 LIGAND, NKG2D, MICA, MICB, NKG2A, NKG2B, NKG2C, NKG2E, NKG2F, TAPI, and TAP2.

[0502] Additional adjuvants include: MCP-1, MIP-la, MIP-lp, IL-8, RANTES, L-selectin, P-selectin, E-selectin, CD34, GlyCAM-1, MadCAM-1, LFA-1, VLA-1, Mac-1, p150.95, PECAM, ICAM-1, ICAM-2, ICAM-3, CD2, LFA-3, M-CSF, G-CSF, IL-4, mutant forms of IL-18, CD40, CD40L, vascular growth factor, fibroblast growth factor, IL-7, IL-22, nerve growth factor, vascular endothelial growth factor, Fas, TNF receptor, Fit, Apo-1, p55, WSL-1, DR3, TRAMP, Apo-3, AIR, LARD, NGRF, DR4, DR5, KILLER, TRAIL-R2, TRICK2, DR6, Caspase ICE, Fos, c-jun, Sp-1, Ap-1, Ap-2, p38, p65Rel, MyD88, IRAK, TRAF6, IκB, Inactive NIK, SAP K, SAP-1, JNK, interferon response genes, NFκB, Bax, TRAIL, TRAILrec, TRAILrecDRC5, TRAIL-R3, TRAIL-R4, RANK, RANK LIGAND, Ox40, Ox40 LIGAND, NKG2D, MICA, MICB, NKG2A, NKG2B, NKG2C, NKG2E, NKG2F, TAP1, TAP2 and functional fragments thereof.

[0503] In some aspects, an adjuvant can be a modulator of a toll like receptor. Examples of modulators of toll-like receptors include TLR-9 agonists and are not limited to small molecule modulators of toll-like receptors such as Imiquimod. Other examples of adjuvants that are used in combination with an immunogenic pharmaceutical composition described herein can include and are not limited to saponin, CpG ODN and the like. Sometimes, an adjuvant is selected from bacteria toxoids, polyoxypropylene-polyoxyethylene block polymers, aluminum salts, liposomes, CpG polymers, oil-in-water emulsions, or a combination thereof. Sometimes, an adjuvant is an oil-in-water emulsion. The oil-in-water emulsion can include at least one oil and at least one surfactant, with the oil(s) and surfactant(s) being biodegradable (metabolisable) and biocompatible. The oil droplets in the emulsion can be less than 5 μm in diameter, and can even have a sub-micron diameter, with these small sizes being achieved with a microfluidiser to provide stable emulsions. Droplets with a size less than 220 nm can be subjected to filter sterilization.

### Methods of Treatment and Pharmaceutical Compositions

[0504] The neoantigen therapeutics (e.g., peptides, polynucleotides, TCR, CAR, cells containing TCR or CAR, APC or dendritic cell containing polypeptide, dendritic cell containing polynucleotide, antibody, etc.) described herein are useful in a variety of applications including, but not limited to, therapeutic treatment methods, such as the treatment of cancer. In some embodiments, the therapeutic treatment methods comprise immunotherapy. In certain embodiments, a neoantigenic peptide is useful for activating, promoting, increasing, and/or enhancing an immune response, redirecting an existing immune response to a new target, increasing the immunogenicity of a tumor, inhibiting tumor growth, reducing tumor volume, increasing tumor cell apoptosis, and/or reducing the tumorigenicity of a tumor. The methods of use can be in vitro, ex vivo, or in vivo methods.

[0505] In some aspects, the present disclosure provides methods for activating an immune response in a subject using a neoantigenic peptide or protein described herein. In some embodiments, the present disclosure provides methods for promoting an immune response in a subject using a neoantigenic peptide described herein. In some embodiments, the present disclosure provides methods for increasing an immune response in a subject using a neoantigenic peptide described herein. In some embodiments, the present disclosure provides methods for enhancing an immune response using a neoantigenic peptide. In some embodiments, the activating, promoting, increasing, and/or enhancing of an immune response comprises increasing cell-mediated immunity. In some embodiments, the activating, promoting, increasing, and/or enhancing of an immune response comprises increasing T cell activity or humoral immunity. In some embodiments, the activating, promoting, increasing, and/or enhancing of an immune response comprises increasing CTL or Th activity. In some embodiments, the activating, promoting, increasing, and/or enhancing of an immune response comprises increasing NK cell activity. In some embodiments, the activating, promoting, increasing, and/or enhancing of an immune response comprises increasing T cell activity and increasing NK cell activity. In some embodiments, the activating, promoting, increasing, and/or enhancing of an immune response comprises increasing CTL activity and increasing NK cell activity. In some embodiments, the activating, promoting, increasing, and/or enhancing of an immune response comprises inhibiting or decreasing the suppressive activity of T regulatory (Treg) cells. In some embodiments, the immune response is a result of antigenic stimulation. In some embodiments, the antigenic stimulation is a tumor cell. In some embodiments, the antigenic stimulation is cancer.

[0506] In some embodiments, the present disclosure provides methods of activating, promoting, increasing, and/or enhancing of an immune response using a neoantigenic peptide described herein. In some embodiments, a method comprises administering to a subject in need thereof a therapeutically effective amount of a neoantigenic peptide that delivers a neoantigenic peptide or polynucleotide to a tumor cell. In some embodiments, a method comprises administering to a subject in need thereof a therapeutically effective amount of a neoantigenic peptide internalized by the tumor cell. In some embodiments, a method comprises administering to a subject in need thereof a therapeutically effective amount of a neoantigenic peptide that is internalized by a tumor cell, and the neoantigenic peptide is processed by the cell. In some embodiments, a method comprises administering to a subject in need thereof a therapeutically effective amount of a neoantigenic polypeptide that is internalized by a tumor cell and a neoepitope is presented on the surface of the tumor cell. In some embodiments, a method comprises administering to a subject in need thereof a therapeutically effective amount of a neoantigenic polypeptide that is internalized by the tumor cell, is processed by the cell, and an antigenic peptide is presented on the surface of the tumor cell.

[0507] In some embodiments, a method comprises administering to a subject in need thereof a therapeutically effective amount of a neoantigenic peptide or polynucleotide described herein that delivers an exogenous polypeptide comprising at least one neoantigenic peptide to a tumor cell, wherein at least one neoepitope derived from the neoantigenic peptide is presented on the surface of the tumor cell. In some embodiments, the antigenic peptide is presented on the surface of the tumor cell in complex with a MHC class I molecule. In some embodiments, the neoepitope is presented on the surface of the tumor cell in complex with a MHC class II molecule.

[0508] In some embodiments, a method comprises contacting a tumor cell with a neoantigenic polypeptide or polynucleotide described herein that delivers an exogenous polypeptide comprising at least one neoantigenic peptide to the tumor cell, wherein at least one neoepitope derived from the at least one neoantigenic peptide is presented on the surface of the tumor cell. In some embodiments, the neoepitope is presented on the surface of the tumor cell in complex with a MHC class I molecule. In some embodiments, the neoepitope is presented on the surface of the tumor cell in complex with a MHC class II molecule.

[0509] In some embodiments, a method comprises administering to a subject in need thereof a therapeutically effective amount of a neoantigenic polypeptide or polynucleotide described herein that delivers an exogenous polypeptide comprising at least one antigenic peptide to a tumor cell, wherein the neoepitope is presented on the surface of the tumor cell, and an immune response against the tumor cell is induced. In some embodiments, the immune response against the tumor cell is increased. In some embodiments, the neoantigenic polypeptide or polynucleotide delivers an exogenous polypeptide comprising at least one neoantigenic peptide to a tumor cell, wherein the neoepitope is presented on the surface of the tumor cell, and tumor growth is inhibited.

[0510] In some embodiments, a method comprises administering to a subject in need thereof a therapeutically effective amount of a neoantigenic polypeptide or polynucleotide described herein that delivers an exogenous polypeptide comprising at least one neoantigenic peptide to a tumor cell, wherein the neoepitope derived from the at least one neoantigenic peptide is presented on the surface of the tumor cell, and T cell killing directed against the tumor cell is induced. In some embodiments, T cell killing directed against the tumor cell is enhanced. In some embodiments, T cell killing directed against the tumor cell is increased.

[0511] In some embodiments, a method of increasing an immune response in a subject comprises administering to the subject a therapeutically effective amount of a neoantigenic therapeutic described herein, wherein the agent is an antibody that specifically binds the neoantigen described herein. In some embodiments, a method of increasing an immune response in a subject comprises administering to the subject a therapeutically effective amount of the antibody.

[0512] The present disclosure provides methods of redirecting an existing immune response to a tumor. In some embodiments, a method of redirecting an existing immune response to a tumor comprises administering to a subject a therapeutically effective amount of a neoantigen therapeutic described herein. In some embodiments, the existing immune response is against a virus. In some embodiments, the virus is selected from the group consisting of: measles virus, varicella-zoster virus (VZV; chickenpox virus), influenza virus, mumps virus, poliovirus, rubella virus, rotavirus, hepatitis A virus (HAV), hepatitis B virus (HBV), Epstein Barr virus (EBV), and cytomegalovirus (CMV). In some embodiments, the virus is varicella-zoster virus. In some embodiments, the virus is cytomegalovirus. In some embodiments, the virus is measles virus. In some embodiments, the existing immune response has been acquired after a natural viral infection. In some embodiments, the existing immune response has been acquired after vaccination against a virus. In some embodiments, the existing immune response is a cell-mediated response. In some embodiments, the existing immune response comprises cytotoxic T cells (CTLs) or Th cells.

[0513] In some embodiments, a method of redirecting an existing immune response to a tumor in a subject comprises administering a fusion protein comprising (i) an antibody that specifically binds a neoantigen and (ii) at least one neoantigenic peptide described herein, wherein (a) the fusion protein is internalized by a tumor cell after binding to the tumor-associated antigen or the neoepitope; (b) the neoantigenic peptide is processed and presented on the surface of the tumor cell associated with a MHC class I molecule; and (c) the neoantigenic peptide/MHC Class I complex is recognized by cytotoxic T cells. In some embodiments, the cytotoxic T cells are memory T cells. In some embodiments, the memory T cells are the result of a vaccination with the neoantigenic peptide.

[0514] The present disclosure provides methods of increasing the immunogenicity of a tumor. In some embodiments, a method of increasing the immunogenicity of a tumor comprises contacting a tumor or tumor cells with an effective amount of a neoantigen therapeutic described herein. In some embodiments, a method of increasing the immunogenicity of a tumor comprises administering to a subject a therapeutically effective amount of a neoantigen therapeutic described herein.

[0515] The present disclosure also provides methods for inhibiting growth of a tumor using a neoantigen therapeutic described herein. In certain embodiments, a method of inhibiting growth of a tumor comprises contacting a cell mixture with a neoantigen therapeutic in vitro. For example, an immortalized cell line or a cancer cell line mixed with immune cells (e.g., T cells) is cultured in medium to which a neoantigenic peptide is added. In some embodiments, tumor cells are isolated from a patient sample, for example, a tissue biopsy, pleural effusion, or blood sample, mixed with immune cells (e.g., T cells), and cultured in medium to which a neoantigen therapeutic is added. In some embodiments, a neoantigen therapeutic increases, promotes, and/or enhances the activity of the immune cells. In some embodiments, a neoantigen therapeutic inhibits tumor cell growth. In some embodiments, a neoantigen therapeutic activates killing of the tumor cells.

[0516] In certain embodiments, the subject is a human. In certain embodiments, the subject has a tumor or the subject had a tumor which was at least partially removed.

[0517] In some embodiments, a method of inhibiting growth of a tumor comprises redirecting an existing immune response to a new target, comprising administering to a subject a therapeutically effective amount of a neoantigen therapeutic, wherein the existing immune response is against an antigenic peptide delivered to the tumor cell by the neoantigenic peptide. In some embodiments, the method of treatment involves a step of identifying one or more HLA subtypes expressed in the subject before administrating a peptide, such that the peptide binds to at least one or more HLA subtype specifically expressed by the subject. In some embodiments, if one or more mutant BTK peptides selected from Table 34 are administered in a subject, a prior determination of the expression of the HLA subtype corresponding to the peptide from Table 34 is performed in the subject, such that the administered peptide binds to at least one or more HLA subtype specifically expressed by the subject. In some embodiments, the method comprises determining that the subject expresses a protein encoded by HLA-C14:02 allele, HLA-C14:03 allele, HLA-A33:03 allele, HLA-C04:01 allele, HLA-B15:09 allele or HLA-B38:02 allele, wherein the therapeutic comprises a mutant BTK peptide having the amino acid sequence EYMANGSLL. In some embodiments, if the method comprises determining that the subject expresses a protein encoded by any one of HLA-C02:02 allele, HLA-C03:02 allele, HLA-B53:01 allele, HLA-C12:02 allele, HLA-C12:03 allele, HLA-A36:01 allele, HLA-A26:01 allele, HLA-A25:01 allele, HLA-B57:01 allele, HLA-A03:01 allele, HLA-B46:01 allele, HLA-B15:03 allele, HLA-A33:03 allele, HLA-B35:03 allele or a HLA-A11:01 allele, wherein the therapeutic comprises a mutant BTK peptide having the amino acid sequence MANGSLLNY. In some embodiments, the method comprises determining that the subject expresses a protein encoded by any one of HLA-A02:04 allele, HLA-A02:03 allele, HLA-C03:02 allele, HLA-A03:01 allele, HLA-A32:01 allele, HLA-A02:07 allele, HLA-C14:03 allele, HLA-C14:02 allele, HLA-A31:01 allele, HLA-A30:02 allele, HLA-A74:01 allele, HLA-C06:02 allele, HLA-B15:03 allele, HLA-B46:01 allele, HLA-B13:02 allele, HLA-A25:01 allele, HLA-A29:02 allele or a HLA-C01:02 allele, wherein the therapeutic comprises a mutant BTK peptide having the amino acid sequence SLLNYLREM.

[0518] In some embodiments, the method comprises determining that the subject expresses a protein encoded by any one of HLA-B14:02 allele, HLA-B49:01 allele, HLA-B44:03 allele, HLA-B44:02 allele, HLA-B37:01 allele, HLA-B15:09 allele, HLA-B41:01 or HLA-B50:01 allele, wherein the therapeutic comprises a mutant BTK peptide having the amino acid sequence TEYMANGSL.

[0519] In certain embodiments, the tumor comprises cancer stem cells. In certain embodiments, the frequency of cancer stem cells in the tumor is reduced by administration of the neoantigen therapeutic. In some embodiments, a method of reducing the frequency of cancer stem cells in a tumor in a subject, comprising administering to the subject a therapeutically effective amount of a neoantigen therapeutic is provided.

[0520] In addition, in some aspects the present disclosure provides a method of reducing the tumorigenicity of a tumor in a subject, comprising administering to the subject a therapeutically effective amount of a neoantigen therapeutic described herein. In certain embodiments, the tumor comprises cancer stem cells. In some embodiments, the tumorigenicity of a tumor is reduced by reducing the frequency of cancer stem cells in the tumor. In some embodiments, the methods comprise using the neoantigen therapeutic described herein. In certain embodiments, the frequency of cancer stem cells in the tumor is reduced by administration of a neoantigen therapeutic described herein.

[0521] In some embodiments, the tumor is a solid tumor. In certain embodiments, the tumor is a tumor selected from the group consisting of: colorectal tumor, pancreatic tumor, lung tumor, ovarian tumor, liver tumor, breast tumor, kidney tumor, prostate tumor, neuroendocrine tumor, gastrointestinal tumor, melanoma, cervical tumor, bladder tumor, glioblastoma, and head and neck tumor. In certain embodiments, the tumor is a colorectal tumor. In certain embodiments, the tumor is an ovarian tumor. In some embodiments, the tumor is a breast tumor. In some embodiments, the tumor is a lung tumor. In certain embodiments, the tumor is a pancreatic tumor. In certain embodiments, the tumor is a melanoma tumor. In some embodiments, the tumor is a solid tumor.

[0522] The present disclosure further provides methods for treating cancer in a subject comprising administering to the subject a therapeutically effective amount of a neoantigen therapeutic described herein.

[0523] In some embodiments, a method of treating cancer comprises redirecting an existing immune response to a new target, the method comprising administering to a subject a therapeutically effective amount of neoantigen therapeutic, wherein the existing immune response is against an antigenic peptide delivered to the cancer cell by the neoantigenic peptide.

[0524] The present disclosure provides for methods of treating cancer comprising administering to a subject a therapeutically effective amount of a neoantigen therapeutic described herein (e.g., a subject in need of treatment). In certain embodiments, the subject is a human. In certain embodiments, the subject has a cancerous tumor. In certain embodiments, the subject has had a tumor at least partially removed.

[0525] Subjects can be, for example, mammal, humans, pregnant women, elderly adults, adults, adolescents, pre-adolescents, children, toddlers, infants, newborn, or neonates. A subject can be a patient. In some cases, a subject can be a human. In some cases, a subject can be a child (i.e. a young human being below the age of puberty). In some cases, a subject can be an infant. In some cases, the subject can be a formula-fed infant. In some cases, a subject can be an individual enrolled in a clinical study. In some cases, a subject can be a laboratory animal, for example, a mammal, or a rodent. In some cases, the subject can be a mouse. In some cases, the subject can be an obese or overweight subject.

[0526] In some embodiments, the subject has previously been treated with one or more different cancer treatment modalities. In some embodiments, the subject has previously been treated with one or more of radiotherapy, chemotherapy, or immunotherapy. In some embodiments, the subject has been treated with one, two, three, four, or five lines of prior therapy. In some embodiments, the prior therapy is a cytotoxic therapy.

[0527] In certain embodiments, the cancer is a cancer selected from the group consisting of colorectal cancer, pancreatic cancer, lung cancer, ovarian cancer, liver cancer, breast cancer, kidney cancer, prostate cancer, gastrointestinal cancer, melanoma, cervical cancer, neuroendocrine cancer, bladder cancer, glioblastoma, and head and neck cancer. In certain embodiments, the cancer is pancreatic cancer. In certain embodiments, the cancer is ovarian cancer. In certain embodiments, the cancer is colorectal cancer. In certain embodiments, the cancer is breast cancer. In certain embodiments, the cancer is prostate cancer. In certain embodiments, the cancer is lung cancer. In certain embodiments, the cancer is melanoma. In some embodiments, the cancer is a solid cancer. In some embodiments, the cancer comprises a solid tumor.

[0528] In some embodiments, the cancer is a hematologic cancer. In some embodiment, the cancer is selected from the group consisting of: acute myelogenous leukemia (AML), Hodgkin lymphoma, multiple myeloma, T cell acute lymphoblastic leukemia (T-ALL), chronic lymphocytic leukemia (CLL), hairy cell leukemia, chronic myelogenous leukemia (CML), non-Hodgkin lymphoma, diffuse large B-cell lymphoma (DLBCL), mantle cell lymphoma (MCL), and cutaneous T cell lymphoma (CTCL).

[0529] In some embodiments, the neoantigen therapeutic is administered as a combination therapy. Combination therapy with two or more therapeutic agents uses agents that work by different mechanisms of action, although this is not required. Combination therapy using agents with different mechanisms of action can result in additive or synergetic effects. Combination therapy can allow for a lower dose of each agent than is used in monotherapy, thereby reducing toxic side effects and/or increasing the therapeutic index of the agent(s). Combination therapy can decrease the likelihood that resistant cancer cells will develop. In some embodiments, combination therapy comprises a therapeutic agent that affects the immune response (e.g., enhances or activates the response) and a therapeutic agent that affects (e.g., inhibits or kills) the tumor/cancer cells.

[0530] In some instances, an immunogenic pharmaceutical composition can be administered with an additional agent. In some embodiments, the neoantigen therapeutic can be administered with an immunotherapy. The immunotherapy can be, for example, an antibody targeting an immune checkpoint. In some embodiments, the antibody is a bispecific antibody. The choice of the additional agent can depend, at least in part, on the condition being treated. The additional agent can include, for example, a checkpoint inhibitor agent such as an anti-PD1, anti-CTLA4, anti-PD-L1, anti CD40, or anti-TIM3 agent (e.g., an anti-PD1, anti-CTLA4, anti-PD-L1, anti CD40, or anti-TIM3 antibody); or any agents having a therapeutic effect for a pathogen infection (e.g. viral infection), including, e.g., drugs used to treat inflammatory conditions such as an NSAID, e.g., ibuprofen, naproxen, acetaminophen, ketoprofen, or aspirin. For example, the checkpoint inhibitor can be a PD-1/PD-L1 antagonist selected from the group consisting of: nivolumab (ONO-4538/BMS-936558, MDX1 106, OPDIVO), pembrolizumab (MK-3475, KEYTRUDA), pidilizumab (CT-011), and MPDL3280A (ROCHE). As another example, formulations can additionally contain one or more supplements, such as vitamin C, E or other anti-oxidants.

[0531] The methods of the disclosure can be used to treat any type of cancer known in the art. Non-limiting examples of cancers to be treated by the methods of the present disclosure can include melanoma (e.g., metastatic malignant melanoma), renal cancer (e.g., clear cell carcinoma), prostate cancer (e.g., hormone refractory prostate adenocarcinoma), pancreatic adenocarcinoma, breast cancer, colon cancer, lung cancer (e.g., non-small cell lung cancer), esophageal cancer, squamous cell carcinoma of the head and neck, liver cancer, ovarian cancer, cervical cancer, thyroid cancer, glioblastoma, glioma, leukemia, lymphoma, and other neoplastic malignancies.

[0532] Additionally, the disease or condition provided herein includes refractory or recurrent malignancies whose growth may be inhibited using the methods of treatment of the present disclosure. In some embodiments, a cancer to be treated by the methods of treatment of the present disclosure is selected from the group consisting of carcinoma, squamous carcinoma, adenocarcinoma, sarcomata, endometrial cancer, breast cancer, ovarian cancer, cervical cancer, fallopian tube cancer, primary peritoneal cancer, colon cancer, colorectal cancer, squamous cell carcinoma of the anogenital region, melanoma, renal cell carcinoma, lung cancer, non-small cell lung cancer, squamous cell carcinoma of the lung, stomach cancer, bladder cancer, gall bladder cancer, liver cancer, thyroid cancer, laryngeal cancer, salivary gland cancer, esophageal cancer, head and neck cancer, glioblastoma, glioma, squamous cell carcinoma of the head and neck, prostate cancer, pancreatic cancer, mesothelioma, sarcoma, hematological cancer, leukemia, lymphoma, neuroma, and combinations thereof. In some embodiments, a cancer to be treated by the methods of the present disclosure include, for example, carcinoma, squamous carcinoma (for example, cervical canal, eyelid, tunica conjunctiva, vagina, lung, oral cavity, skin, urinary bladder, tongue, larynx, and gullet), and adenocarcinoma (for example, prostate, small intestine, endometrium, cervical canal, large intestine, lung, pancreas, gullet, rectum, uterus, stomach, mammary gland, and ovary). In some embodiments, a cancer to be treated by the methods of the present disclosure further include sarcomata (for example, myogenic sarcoma), leukosis, neuroma, melanoma, and lymphoma. In some embodiments, a cancer to be treated by the methods of the present disclosure is breast cancer. In some embodiments, a cancer to be treated by the methods of treatment of the present disclosure is triple negative breast cancer (TNBC). In some embodiments, a cancer to be treated by the methods of treatment of the present disclosure is ovarian cancer. In some embodiments, a cancer to be treated by the methods of treatment of the present disclosure is colorectal cancer.

[0533] In some embodiments, a patient or population of patients to be treated with a pharmaceutical composition of the present disclosure have a solid tumor. In some embodiments, a solid tumor is a melanoma, renal cell carcinoma, lung cancer, bladder cancer, breast cancer, cervical cancer, colon cancer, gall bladder cancer, laryngeal cancer, liver cancer, thyroid cancer, stomach cancer, salivary gland cancer, prostate cancer, pancreatic cancer, or Merkel cell carcinoma. In some embodiments, a patient or population of patients to be treated with a pharmaceutical composition of the present disclosure have a hematological cancer. In some embodiments, the patient has a hematological cancer such as Diffuse large B cell lymphoma (“DLBCL”), Hodgkin's lymphoma (“HL”), Non-Hodgkin's lymphoma (“NHL”), Follicular lymphoma (“FL”), acute myeloid leukemia (“AML”), or Multiple myeloma (“MM”). In some embodiments, a patient or population of patients to be treated having the cancer selected from the group consisting of ovarian cancer, lung cancer and melanoma.

[0534] Specific examples of cancers that can be prevented and/or treated in accordance with present disclosure include, but are not limited to, the following: renal cancer, kidney cancer, glioblastoma multiforme, metastatic breast cancer; breast carcinoma; breast sarcoma; neurofibroma; neurofibromatosis; pediatric tumors; neuroblastoma; malignant melanoma; carcinomas of the epidermis; leukemias such as but not limited to, acute leukemia, acute lymphocytic leukemia, acute myelocytic leukemias such as myeloblastic, promyelocytic, myelomonocytic, monocytic, erythroleukemia leukemias and myclodysplastic syndrome, chronic leukemias such as but not limited to, chronic myelocytic (granulocytic) leukemia, chronic lymphocytic leukemia, hairy cell leukemia; polycythemia vera; lymphomas such as but not limited to Hodgkin's disease, non-Hodgkin's disease; multiple myelomas such as but not limited to smoldering multiple myeloma, nonsecretory myeloma, osteosclerotic myeloma, plasma cell leukemia, solitary plasmacytoma and extramedullary plasmacytoma; Waldenstrom's macroglobulinemia; monoclonal gammopathy of undetermined significance; benign monoclonal gammopathy; heavy chain disease; bone cancer and connective tissue sarcomas such as but not limited to bone sarcoma, myeloma bone disease, multiple myeloma, cholesteatoma-induced bone osteosarcoma, Paget's disease of bone, osteosarcoma, chondrosarcoma, Ewing's sarcoma, malignant giant cell tumor, fibrosarcoma of bone, chordoma, periosteal sarcoma, soft-tissue sarcomas, angiosarcoma (hemangiosarcoma), fibrosarcoma, Kaposi's sarcoma, leiomyosarcoma, liposarcoma, lymphangio sarcoma, neurilemmoma, rhabdomyosarcoma, and synovial sarcoma; brain tumors such as but not limited to, glioma, astrocytoma, brain stem glioma, ependymoma, oligodendroglioma, nonglial tumor, acoustic neurinoma, craniopharyngioma, medulloblastoma, meningioma, pineocytoma, pineoblastoma, and primary brain lymphoma; breast cancer including but not limited to adenocarcinoma, lobular (small cell) carcinoma, intraductal carcinoma, medullary breast cancer, mucinous breast cancer, tubular breast cancer, papillary breast cancer, Paget's disease (including juvenile Paget's disease) and inflammatory breast cancer; adrenal cancer such as but not limited to pheochromocytom and adrenocortical carcinoma; thyroid cancer such as but not limited to papillary or follicular thyroid cancer, medullary thyroid cancer and anaplastic thyroid cancer; pancreatic cancer such as but not limited to, insulinoma, gastrinoma, glucagonoma, vipoma, somatostatin-secreting tumor, and carcinoid or islet cell tumor; pituitary cancers such as but limited to Cushing's disease, prolactin-secreting tumor, acromegaly, and diabetes insipius; eye cancers such as but not limited to ocular melanoma such as iris melanoma, choroidal melanoma, and cilliary body melanoma, and retinoblastoma; vaginal cancers such as squamous cell carcinoma, adenocarcinoma, and melanoma; vulvar cancer such as squamous cell carcinoma, melanoma, adenocarcinoma, basal cell carcinoma, sarcoma, and Paget's disease; cervical cancers such as but not limited to, squamous cell carcinoma, and adenocarcinoma; uterine cancers such as but not limited to endometrial carcinoma and uterine sarcoma; ovarian cancers such as but not limited to, ovarian epithelial carcinoma, borderline tumor, germ cell tumor, and stromal tumor; cervical carcinoma; esophageal cancers such as but not limited to, squamous cancer, adenocarcinoma, adenoid cyctic carcinoma, mucoepidermoid carcinoma, adenosquamous carcinoma, sarcoma, melanoma, plasmacytoma, verrucous carcinoma, and oat cell (small cell) carcinoma; stomach cancers such as but not limited to, adenocarcinoma, fungating (polypoid), ulcerating, superficial spreading, diffusely spreading, malignant lymphoma, liposarcoma, fibrosarcoma, and carcinosarcoma; colon cancers; colorectal cancer, KRAS mutated colorectal cancer; colon carcinoma; rectal cancers; liver cancers such as but not limited to hepatocellular carcinoma and hepatoblastoma, gallbladder cancers such as adenocarcinoma; cholangiocarcinomas such as but not limited to pappillary, nodular, and diffuse; lung cancers such as KRAS-mutated non-small cell lung cancer, non-small cell lung cancer, squamous cell carcinoma (epidermoid carcinoma), adenocarcinoma, large-cell carcinoma and small-cell lung cancer; lung carcinoma; testicular cancers such as but not limited to germinal tumor, seminoma, anaplastic, classic (typical), spermatocytic, nonseminoma, embryonal carcinoma, teratoma carcinoma, choriocarcinoma (yolk-sac tumor), prostate cancers such as but not limited to, androgen-independent prostate cancer, androgen-dependent prostate cancer, adenocarcinoma, leiomyosarcoma, and rhabdomyosarcoma; penal cancers; oral cancers such as but not limited to squamous cell carcinoma; basal cancers; salivary gland cancers such as but not limited to adenocarcinoma, mucoepidermoid carcinoma, and adenoidcystic carcinoma; pharynx cancers such as but not limited to squamous cell cancer, and verrucous; skin cancers such as but not limited to, basal cell carcinoma, squamous cell carcinoma and melanoma, superficial spreading melanoma, nodular melanoma, lentigo malignant melanoma, acrallentiginous melanoma; kidney cancers such as but not limited to renal cell cancer, adenocarcinoma, hypernephroma, fibrosarcoma, transitional cell cancer (renal pelvis and/or uterer); renal carcinoma; Wilms' tumor; bladder cancers such as but not limited to transitional cell carcinoma, squamous cell cancer, adenocarcinoma, carcinosarcoma. In addition, cancers include myxosarcoma, osteogenic sarcoma, endotheliosarcoma, lymphangioendotheliosarcoma, mesothelioma, synovioma, hemangioblastoma, epithelial carcinoma, cystadenocarcinoma, bronchogenic carcinoma, sweat gland carcinoma, sebaceous gland carcinoma, papillary carcinoma and papillary adenocarcinomas.

[0535] Cancers include, but are not limited to, B cell cancer, e.g., multiple myeloma, Waldenstrom's macroglobulinemia, the heavy chain diseases, such as, for example, alpha chain disease, gamma chain disease, and mu chain disease, benign monoclonal gammopathy, and immunocytic amyloidosis, melanomas, breast cancer, lung cancer, bronchus cancer, colorectal cancer, prostate cancer (e.g., metastatic, hormone refractory prostate cancer), pancreatic cancer, stomach cancer, ovarian cancer, urinary bladder cancer, brain or central nervous system cancer, peripheral nervous system cancer, esophageal cancer, cervical cancer, uterine or endometrial cancer, cancer of the oral cavity or pharynx, liver cancer, kidney cancer, testicular cancer, biliary tract cancer, small bowel or appendix cancer, salivary gland cancer, thyroid gland cancer, adrenal gland cancer, osteosarcoma, chondrosarcoma, cancer of hematological tissues, and the like. Other non-limiting examples of types of cancers applicable to the methods encompassed by the present disclosure include human sarcomas and carcinomas, e.g., fibrosarcoma, myxosarcoma, liposarcoma, chondrosarcoma, osteogenic sarcoma, chordoma, angiosarcoma, endotheliosarcoma, lymphangiosarcoma, lymphangioendotheliosarcoma, synovioma, mesothelioma, Ewing's tumor, leiomyosarcoma, rhabdomyosarcoma, colon carcinoma, colorectal cancer, pancreatic cancer, breast cancer, ovarian cancer, squamous cell carcinoma, basal cell carcinoma, adenocarcinoma, sweat gland carcinoma, sebaceous gland carcinoma, papillary carcinoma, papillary adenocarcinomas, cystadenocarcinoma, medullary carcinoma, bronchogenic carcinoma, renal cell carcinoma, hepatoma, bile duct carcinoma, liver cancer, choriocarcinoma, seminoma, embryonal carcinoma, Wilms' tumor, cervical cancer, bone cancer, brain tumor, testicular cancer, lung carcinoma, small cell lung carcinoma, bladder carcinoma, epithelial carcinoma, glioma, astrocytoma, medulloblastoma, craniopharyngioma, ependymoma, pinealoma, hemangioblastoma, acoustic neuroma, oligodendroglioma, meningioma, melanoma, neuroblastoma, retinoblastoma; leukemias, e.g., acute lymphocytic leukemia and acute myelocytic leukemia (myeloblastic, promyelocytic, myelomonocytic, monocytic and erythroleukemia); chronic leukemia (chronic myelocytic (granulocytic) leukemia and chronic lymphocytic leukemia); and polycythemia vera, lymphoma (Hodgkin's disease and non-Hodgkin's disease), multiple myeloma, Waldenstrom's macroglobulinemia, and heavy chain disease. In some embodiments, the cancer whose phenotype is determined by the method of the present disclosure is an epithelial cancer such as, but not limited to, bladder cancer, breast cancer, cervical cancer, colon cancer, gynecologic cancers, renal cancer, laryngeal cancer, lung cancer, oral cancer, head and neck cancer, ovarian cancer, pancreatic cancer, prostate cancer, or skin cancer. In other embodiments, the cancer is breast cancer, prostate cancer, lung cancer, or colon cancer. In still other embodiments, the epithelial cancer is non-small-cell lung cancer, nonpapillary renal cell carcinoma, cervical carcinoma, ovarian carcinoma (e.g., serous ovarian carcinoma), or breast carcinoma. The epithelial cancers may be characterized in various other ways including, but not limited to, serous, endometrioid, mucinous, clear cell, brenner, or undifferentiated. In some embodiments, the present disclosure is used in the treatment, diagnosis, and/or prognosis of lymphoma or its subtypes, including, but not limited to, mantle cell lymphoma. Lymphoproliferative disorders are also considered to be proliferative diseases.

[0536] In some embodiments, the combination of an agent described herein and at least one additional therapeutic agent results in additive or synergistic results. In some embodiments, the combination therapy results in an increase in the therapeutic index of the agent. In some embodiments, the combination therapy results in an increase in the therapeutic index of the additional therapeutic agent(s). In some embodiments, the combination therapy results in a decrease in the toxicity and/or side effects of the agent. In some embodiments, the combination therapy results in a decrease in the toxicity and/or side effects of the additional therapeutic agent(s).

[0537] In certain embodiments, in addition to administering a neoantigen therapeutic described herein, the method or treatment further comprises administering at least one additional therapeutic agent. An additional therapeutic agent can be administered prior to, concurrently with, and/or subsequently to, administration of the agent. In some embodiments, the at least one additional therapeutic agent comprises 1, 2, 3, or more additional therapeutic agents.

[0538] Therapeutic agents that can be administered in combination with the neoantigen therapeutic described herein include chemotherapeutic agents. Thus, in some embodiments, the method or treatment involves the administration of an agent described herein in combination with a chemotherapeutic agent or in combination with a cocktail of chemotherapeutic agents. Treatment with an agent can occur prior to, concurrently with, or subsequent to administration of chemotherapies. Combined administration can include co-administration, either in a single pharmaceutical formulation or using separate formulations, or consecutive administration in either order but generally within a time period such that all active agents can exert their biological activities simultaneously. Preparation and dosing schedules for such chemotherapeutic agents can be used according to manufacturers' instructions or as determined empirically by the skilled practitioner. Preparation and dosing schedules for such chemotherapy are also described in The Chemotherapy Source Book, 4th Edition, 2008, M. C. Perry, Editor, Lippincott, Williams & Wilkins, Philadelphia, Pa.

[0539] Useful classes of chemotherapeutic agents include, for example, anti-tubulin agents, auristatins, DNA minor groove binders, DNA replication inhibitors, alkylating agents (e.g., platinum complexes such as cisplatin, mono(platinum), bis(platinum) and tri-nuclear platinum complexes and carboplatin), anthracyclines, antibiotics, anti-folates, antimetabolites, chemotherapy sensitizers, duocarmycins, etoposides, fluorinated pyrimidines, ionophores, lexitropsins, nitrosoureas, platinols, purine antimetabolites, puromycins, radiation sensitizers, steroids, taxanes, topoisomerase inhibitors, vinca alkaloids, or the like. In certain embodiments, the second therapeutic agent is an alkylating agent, an antimetabolite, an antimitotic, a topoisomerase inhibitor, or an angiogenesis inhibitor.

[0540] Chemotherapeutic agents useful in the present disclosure include, but are not limited to, alkylating agents such as thiotepa and cyclosphosphamide (CYTOXAN); alkyl sulfonates such as busulfan, improsulfan and piposulfan; aziridines such as benzodopa, carboquone, meturedopa, and uredopa; ethylenimines and methylamelamines including altretamine, triethylenemelamine, trietylenephosphoramide, triethylenethiophosphaoramide and trimethylolomelamime; nitrogen mustards such as chlorambucil, chlornaphazine, cholophosphamide, estramustine, ifosfamide, mechlorethamine, mechlorethamine oxide hydrochloride, melphalan, novembichin, phenesterine, prednimustine, trofosfamide, uracil mustard; nitrosureas such as carmustine, chlorozotocin, fotemustine, lomustine, nimustine, ranimustine; antibiotics such as aclacinomysins, actinomycin, authramycin, azaserine, bleomycins, cactinomycin, calicheamicin, carabicin, caminomycin, carzinophilin, chromomycins, dactinomycin, daunorubicin, detorubicin, 6-diazo-5-oxo-L-norleucine, doxorubicin, epirubicin, esorubicin, idarubicin, marcellomycin, mitomycins, mycophenolic acid, nogalamycin, olivomycins, peplomycin, potfiromycin, puromycin, quelamycin, rodorubicin, streptonigrin, streptozocin, tubercidin, ubenimex, zinostatin, zorubicin; anti-metabolites such as methotrexate and 5-fluorouracil (5-FU); folic acid analogues such as denopterin, methotrexate, pteropterin, trimetrexate; purine analogs such as fludarabine, 6-mercaptopurine, thiamiprine, thioguanine; pyrimidine analogs such as ancitabine, azacitidine, 6-azauridine, carmofur, cytosine arabinoside, dideoxyuridine, doxifluridine, enocitabine, floxuridine, 5-FU; androgens such as calusterone, dromostanolone propionate, epitiostanol, mepitiostane, testolactone; anti-adrenals such as aminoglutethimide, mitotane, trilostane; folic acid replenishers such as folinic acid; aceglatone; aldophosphamide glycoside; aminolevulinic acid; amsacrine; bestrabucil; bisantrene; edatraxate; defofamine; demecolcine; diaziquone; elformithine; elliptinium acetate; etoglucid; gallium nitrate; hydroxyurea; lentinan; lonidamine; mitoguazone; mitoxantrone; mopidamol; nitracrine; pentostatin; phenamet; pirarubicin; podophyllinic acid; 2-ethylhydrazide; procarbazine; PSK; razoxane; sizofuran; spirogermanium; tenuazonic acid; triaziquone; 2,2′,2″-trichlorotriethylamine; urethan; vindesine; dacarbazine; mannomustine; mitobronitol; mitolactol; pipobroman; gacytosine; arabinoside (Ara-C); taxoids, e.g. paclitaxel (TAXOL) and docetaxel (TAXOTERE); chlorambucil; gemcitabine; 6-thioguanine; mercaptopurine; platinum analogs such as cisplatin and carboplatin; vinblastine; platinum; etoposide (VP-16); ifosfamide; mitomycin C; mitoxantrone; vincristine; vinorelbine; navelbine; novantrone; teniposide; daunomycin; aminopterin; ibandronate; CPT11; topoisomerase inhibitor RFS 2000; difluoromethylornithine (DMFO); retinoic acid; esperamicins; capecitabine (XELODA); and pharmaceutically acceptable salts, acids or derivatives of any of the above. Chemotherapeutic agents also include anti-hormonal agents that act to regulate or inhibit hormone action on tumors such as anti-estrogens including for example tamoxifen, raloxifene, aromatase inhibiting 4(5)-imidazoles, 4-hydroxytamoxifen, trioxifene, keoxifene, LY117018, onapristone, and toremifene (FARESTON); and anti-androgens such as flutamide, nilutamide, bicalutamide, leuprolide, and goserelin; and pharmaceutically acceptable salts, acids or derivatives of any of the above. In certain embodiments, the additional therapeutic agent is cisplatin. In certain embodiments, the additional therapeutic agent is carboplatin.

[0541] In certain embodiments, the chemotherapeutic agent is a topoisomerase inhibitor. Topoisomerase inhibitors are chemotherapy agents that interfere with the action of a topoisomerase enzyme (e.g., topoisomerase I or II). Topoisomerase inhibitors include, but are not limited to, doxorubicin HCl, daunorubicin citrate, mitoxantrone HCl, actinomycin D, etoposide, topotecan HCl, teniposide (VM-26), and irinotecan, as well as pharmaceutically acceptable salts, acids, or derivatives of any of these. In some embodiments, the additional therapeutic agent is irinotecan.

[0542] In certain embodiments, the chemotherapeutic agent is an anti-metabolite. An anti-metabolite is a chemical with a structure that is similar to a metabolite required for normal biochemical reactions, yet different enough to interfere with one or more normal functions of cells, such as cell division. Anti-metabolites include, but are not limited to, gemcitabine, fluorouracil, capecitabine, methotrexate sodium, ralitrexed, pemetrexed, tegafur, cytosine arabinoside, thioguanine, 5-azacytidine, 6 mercaptopurine, azathioprine, 6-thioguanine, pentostatin, fludarabine phosphate, and cladribine, as well as pharmaceutically acceptable salts, acids, or derivatives of any of these. In certain embodiments, the additional therapeutic agent is gemcitabine.

[0543] In certain embodiments, the chemotherapeutic agent is an antimitotic agent, including, but not limited to, agents that bind tubulin. In some embodiments, the agent is a taxane. In certain embodiments, the agent is paclitaxel or docetaxel, or a pharmaceutically acceptable salt, acid, or derivative of paclitaxel or docetaxel. In certain embodiments, the agent is paclitaxel (TAXOL), docetaxel (TAXOTERE), albumin-bound paclitaxel (ABRAXANE), DHA-paclitaxel, or PG-paclitaxel. In certain alternative embodiments, the antimitotic agent comprises a vinca alkaloid, such as vincristine, vinblastine, vinorelbine, or vindesine, or pharmaceutically acceptable salts, acids, or derivatives thereof. In some embodiments, the antimitotic agent is an inhibitor of kinesin Eg5 or an inhibitor of a mitotic kinase such as Aurora A or Plk1. In certain embodiments, the additional therapeutic agent is paclitaxel. In some embodiments, the additional therapeutic agent is albumin-bound paclitaxel.

[0544] In some embodiments, an additional therapeutic agent comprises an agent such as a small molecule. For example, treatment can involve the combined administration of an agent of the present disclosure with a small molecule that acts as an inhibitor against tumor-associated antigens including, but not limited to, EGFR, HER2 (ErbB2), and/or VEGF. In some embodiments, an agent of the present disclosure is administered in combination with a protein kinase inhibitor selected from the group consisting of: gefitinib (IRESSA), erlotinib (TARCEVA), sunitinib (SUTENT), lapatanib, vandetanib (ZACTIMA), AEE788, CI-1033, cediranib (RECENTIN), sorafenib (NEXAVAR), and pazopanib (GW786034B). In some embodiments, an additional therapeutic agent comprises an mTOR inhibitor. In another embodiment, the additional therapeutic agent is chemotherapy or other inhibitors that reduce the number of Treg cells. In certain embodiments, the therapeutic agent is cyclophosphamide or an anti-CTLA4 antibody. In another embodiment, the additional therapeutic reduces the presence of myeloid-derived suppressor cells. In a further embodiment, the additional therapeutic is carbotaxol. In another embodiment, the additional therapeutic agent shifts cells to a T helper 1 response. In a further embodiment, the additional therapeutic agent is ibrutinib.

[0545] In some embodiments, an additional therapeutic agent comprises a biological molecule, such as an antibody. For example, treatment can involve the combined administration of an agent of the present disclosure with antibodies against tumor-associated antigens including, but not limited to, antibodies that bind EGFR, HER2/ErbB2, and/or VEGF. In certain embodiments, the additional therapeutic agent is an antibody specific for a cancer stem cell marker. In certain embodiments, the additional therapeutic agent is an antibody that is an angiogenesis inhibitor (e.g., an anti-VEGF or VEGF receptor antibody). In certain embodiments, the additional therapeutic agent is bevacizumab (AVASTIN), ramucirumab, trastuzumab (HERCEPTIN), pertuzumab (OMNITARG), panitumumab (VECTIBIX), nimotuzumab, zalutumumab, or cetuximab (ERBITUX).

[0546] The agents and compositions provided herein may be used alone or in combination with conventional therapeutic regimens such as surgery, irradiation, chemotherapy and/or bone marrow transplantation (autologous, syngeneic, allogeneic or unrelated). A set of tumor antigens can be useful, e.g., in a large fraction of cancer patients.

[0547] In some embodiments, at least one or more chemotherapeutic agents may be administered in addition to the composition comprising an immunogenic vaccine. In some embodiments, the one or more chemotherapeutic agents may belong to different classes of chemotherapeutic agents.

[0548] Examples of chemotherapy agents include, but are not limited to, alkylating agents such as nitrogen mustards (e.g. mechlorethamine (nitrogen mustard), chlorambucil, cyclophosphamide (Cytoxan®), ifosfamide, and melphalan); nitrosoureas (e.g. N-Nitroso-N-methylurea, streptozocin, carmustine (BCNU), lomustine, and semustine); alkyl sulfonates (e.g. busulfan); tetrazines (e.g. dacarbazine (DTIC), mitozolomide and temozolomide (Temodar®)); aziridines (e.g. thiotepa, mytomycin and diaziquone); and platinum drugs (e.g. cisplatin, carboplatin, and oxaliplatin); non-classical alkylating agents such as procarbazine and altretamine (hexamethylmelamine); anti-metabolite agents such as 5-fluorouracil (5-FU), 6-mercaptopurine (6-MP), capecitabine (Xeloda®), cladribine, clofarabine, cytarabine (Ara-C®), decitabine, floxuridine, fludarabine, nelarabine, gemcitabine (Gemzar®), hydroxyurea, methotrexate, pemetrexed (Alimta®), pentostatin, thioguanine, Vidaza; anti-microtubule agents such as vinca alkaloids (e.g. vincristine, vinblastine, vinorelbine, vindesine and vinflunine); taxanes (e.g. paclitaxel (Taxol®), docetaxel (Taxotere®)); podophyllotoxin (e.g. etoposide and teniposide); epothilones (e.g. ixabepilone (Ixempra®)); estramustine (Emcyt®); anti-tumor antibiotics such as anthracyclines (e.g. daunorubicin, doxorubicin (Adriamycin®, epirubicin, idarubicin); actinomycin-D; and bleomycin; topoisomerase I inhibitors such as topotecan and irinotecan (CPT-11); topoisomerase II inhibitors such as etoposide (VP-16), teniposide, mitoxantrone, novobiocin, merbarone and aclarubicin; corticosteroids such as prednisone, methylprednisolone (Solumedrol®), and dexamethasone (Decadron®); L-asparaginase; bortezomib (Velcade®); immunotherapeutic agents such as rituximab (Rituxan®), alemtuzumab (Campath®), thalidomide, lenalidomide (Revlimid®), BCG, interleukin-2, interferon-alfa and cancer vaccines such as Provenge®; hormone therapeutic agents such as fulvestrant (Faslodex®), tamoxifen, toremifene (Fareston®), anastrozole (Arimidex®), exemestan (Aromasin®), letrozole (Femara®), megestrol acetate (Megace®), estrogens, bicalutamide (Casodex®), flutamide (Eulexin®), nilutamide (Nilandron®), leuprolide (Lupron®) and goserelin (Zoladex®); differentiating agents such as retinoids, tretinoin (ATRA or Atralin®), bexarotene (Targretin®) and arsenic trioxide (Arsenox®); and targeted therapeutic agents such as imatinib (Gleevec®), gefitinib (Iressa®) and sunitinib (Sutent®). In some embodiments, the chemotherapy is a cocktail therapy. Examples of a cocktail therapy includes, but is not limited to, CHOP/R-CHOP (rituxan, cyclophosphamide, hydroxydoxorubicin, vincristine, and prednisone), EPOCH (etoposide, prednisone, vincristine, cyclophosphamide, hydroxydoxorubicin), Hyper-CVAD (cyclophosphamide, vincristine, hydroxydoxorubicin, dexamethasone), FOLFOX (fluorouracil (5-FU), leucovorin, oxaliplatin), ICE (ifosfamide, carboplatin, etoposide), DHAP (high-dose cytarabine [ara-C], dexamethasone, cisplatin), ESHAP (etoposide, methylprednisolone, cytarabine [ara-C], cisplatin) and CMF (cyclophosphamide, methotrexate, fluouracil).

[0549] In some embodiments, the immunogenic vaccine may be used in combination with an inhibitor of a phosphoinositide 3-kinase (PI3 kinase, PI3K). For example, the immunogenic vaccine may be used in combination with Wortnannin, Demethoxyviridin, LY294002, hibiscone C, Idelalisib, Copanlisib, Duvelisib, Taselisib, Perifosine, Buparlisib, Duvelisib, Alpelisib (BYL719), Umbralisib, (TGR 1202), Copanlisib (BAY 80-6946), PX-866, Dactolisib, CUDC-907, Voxtalisib (SAR245409, XL765), CUDC-907, ME-401, IPI-549, SF1126, RP6530, INK1117, pictilisib (GDC-0941), XL147 (SAR245408), Palomid 529, GSK1059615, ZSTK474, PWT33597, IC87114, TG100-115, CAL263, RP6503, PI-103, GNE-477, AEZS-136 or any combination thereof.

[0550] In some embodiments, doses of the PI3 kinase inhibitor, e.g., Wortmannin, Demethoxyviridin, LY294002, hibiscone C, Idelalisib, Copanlisib, Duvelisib, Taselisib, Perifosine, Buparlisib, Duvelisib, Alpelisib (BYL719), Umbralisib, (TGR 1202), Copanlisib (BAY 80-6946), PX-866, Dactolisib, CUDC-907, Voxtalisib (SAR245409, XL765), CUDC-907, ME-401, IPI-549, SF1126, RP6530, INK1117, pictilisib (GDC-0941), XL147 (SAR245408), Palomid 529, GSK1059615, ZSTK474, PWT33597, IC87114, TG100-115, CAL263, RP6503, PI-103, GNE-477 or AEZS-136, employed for human treatment can be in the range of about 0.01 mg/kg to about 100 mg/kg per day (e.g., about 0.1 mg/kg to about 100 mg/kg per day, about 0.1 mg/kg to about 50 mg/kg per day, about 10 mg/kg per day or about 30 mg/kg per day). The desired dose may be conveniently administered in a single dose, or as multiple doses administered at appropriate intervals, for example as two, three, four or more sub-doses per day.

[0551] In some embodiments, the dosage of the PI3 kinase inhibitor, e.g., Wortmannin, Demethoxyviridin, LY294002, hibiscone C, Idelalisib, Copanlisib, Duvelisib, Taselisib, Perifosine, Buparlisib, Duvelisib, Alpelisib (BYL719), Umbralisib, (TGR 1202), Copanlisib (BAY 80-6946), PX-866, Dactolisib, CUDC-907, Voxtalisib (SAR245409, XL765), CUDC-907, ME-401, IPI-549, SF1126, RP6530, INK1117, pictilisib (GDC-0941), XL147 (SAR245408), Palomid 529, GSK1059615, ZSTK474, PWT33597, IC87114, TG100-115, CAL263, RP6503, PI-103, GNE-477 or AEZS-136, may be from about 1 ng/kg to about 100 mg/kg. The dosage of the PI3 kinase inhibitor, e.g., Wortmannin, Demethoxyviridin, LY294002, hibiscone C, Idelalisib, Copanlisib, Duvelisib, Taselisib, Perifosine, Buparlisib, Duvelisib, Alpelisib (BYL719), Umbralisib, (TGR 1202), Copanlisib (BAY 80-6946), PX-866, Dactolisib, CUDC-907, Voxtalisib (SAR245409, XL765), CUDC-907, ME-401, IPI-549, SF1126, RP6530, INK1117, pictilisib (GDC-0941), XL147 (SAR245408), Palomid 529, GSK1059615, ZSTK474, PWT33597, IC87114, TG100-115, CAL263, RP6503, PI-103, GNE-477 or AEZS-136, may be at any dosage including, but not limited to, about 1 μg/kg, 25 μg/kg, 50 μg/kg, 75 μg/kg, 100 μμg/kg, 125 μg/kg, 150 μg/kg, 175 μg/kg, 200 μg/kg, 225 μg/kg, 250 μg/kg, 275 μg/kg, 300 μg/kg, 325 μg/kg, 350 μg/kg, 375 μg/kg, 400 μg/kg, 425 μg/kg, 450 μg/kg, 475 μg/kg, 500 μg/kg, 525 μg/kg, 550 μg/kg, 575 μg/kg, 600 μg/kg, 625 μg/kg, 650 μg/kg, 675 μg/kg, 700 μg/kg, 725 μg/kg, 750 μg/kg, 775 μg/kg, 800 μg/kg, 825 μg/kg, 850 μg/kg, 875 μg/kg, 900 μg/kg, 925 μg/kg, 950 μg/kg, 975 μg/kg, 1 mg/kg, 2.5 mg/kg, 5 mg/kg, 10 mg/kg, 15 mg/kg, 20 mg/kg, 25 mg/kg, 30 mg/kg, 35 mg/kg, 40 mg/kg, 45 mg/kg, 50 mg/kg, 60 mg/kg, 70 mg/kg, 80 mg/kg, 90 mg/kg, or 100 mg/kg.

[0552] The mode of administration of the immunogenic vaccine and the PI3 kinase inhibitor, e.g., Wortmannin, Demethoxyviridin, LY294002, hibiscone C, Idelalisib, Copanlisib, Duvelisib, Taselisib, Perifosine, Buparlisib, Duvelisib, Alpelisib (BYL719), Umbralisib, (TGR 1202), Copanlisib (BAY 80-6946), PX-866, Dactolisib, CUDC-907, Voxtalisib (SAR245409, XL765), CUDC-907, ME-401, IPI-549, SF1126, RP6530, INK1117, pictilisib (GDC-0941), XL147 (SAR245408), Palomid 529, GSK1059615, ZSTK474, PWT33597, IC87114, TG100-115, CAL263, RP6503, PI-103, GNE-477 or AEZS-136, may be simultaneously or sequentially, wherein the immunogenic vaccine and the at least one additional pharmaceutically active agent are sequentially (or separately) administered. For example, the immunogenic vaccine and the PI3 kinase inhibitor, e.g., Wortmannin, Demethoxyviridin, LY294002, hibiscone C, Idelalisib, Copanlisib, Duvelisib, Taselisib, Perifosine, Buparlisib, Duvelisib, Alpelisib (BYL719), Umbralisib, (TGR 1202), Copanlisib (BAY 80-6946), PX-866, Dactolisib, CUDC-907, Voxtalisib (SAR245409, XL765), CUDC-907, ME-401, IPI-549, SF1126, RP6530, INK1117, pictilisib (GDC-0941), XL147 (SAR245408), Palomid 529, GSK1059615, ZSTK474, PWT33597, IC87114, TG100-115, CAL263, RP6503, PI-103, GNE-477 or AEZS-136, may be provided in a single unit dosage form for being taken together or as separate entities (e.g. in separate containers) to be administered simultaneously or with a certain time difference. This time difference may be between 1 hour and 1 month, e.g., between 1 day and 1 week, e.g., 48 hours and 3 days. In addition, it is possible to administer the immunogenic vaccine via another administration way than the PI3 kinase inhibitor, e.g., Wortmannin, Demethoxyviridin, LY294002, hibiscone C, Idelalisib, Copanlisib, Duvelisib, Taselisib, Perifosine, Buparlisib, Duvelisib, Alpelisib (BYL719), Umbralisib, (TGR 1202), Copanlisib (BAY 80-6946), PX-866, Dactolisib, CUDC-907, Voxtalisib (SAR245409, XL765), CUDC-907, ME-401, IPI-549, SF1126, RP6530, INK1117, pictilisib (GDC-0941), XL147 (SAR245408), Palomid 529, GSK1059615, ZSTK474, PWT33597, IC87114, TG100-115, CAL263, RP6503, PI-103, GNE-477 or AEZS-136. For example, it may be advantageous to administer either the immunogenic vaccine or the PI3 kinase inhibitor, e.g., Wortmannin, Demethoxyviridin, LY294002, hibiscone C, Idelalisib, Copanlisib, Duvelisib, Taselisib, Perifosine, Buparlisib, Duvelisib, Alpelisib (BYL719), Umbralisib, (TGR 1202), Copanlisib (BAY 80-6946), PX-866, Dactolisib, CUDC-907, Voxtalisib (SAR245409, XL765), CUDC-907, ME-401, IPI-549, SF1126, RP6530, INK1117, pictilisib (GDC-0941), XL147 (SAR245408), Palomid 529, GSK1059615, ZSTK474, PWT33597, IC87114, TG100-115, CAL263, RP6503, PI-103, GNE-477 or AEZS-136, intravenously and the other systemically or orally. For example, the immunogenic vaccine is administered intravenously or subcutaneously and the PI3 kinase inhibitor, e.g., Wortmannin, Demethoxyviridin, LY294002, hibiscone C, Idelalisib, Copanlisib, Duvelisib, Taselisib, Perifosine, Buparlisib, Duvelisib, Alpelisib (BYL719), Umbralisib, (TGR 1202), Copanlisib (BAY 80-6946), PX-866, Dactolisib, CUDC-907, Voxtalisib (SAR245409, XL765), CUDC-907, ME-401, IPI-549, SF1126, RP6530, INK1117, pictilisib (GDC-0941), XL147 (SAR245408), Palomid 529, GSK1059615, ZSTK474, PWT33597, IC87114, TG100-115, CAL263, RP6503, PI-103, GNE-477 or AEZS-136, orally.

[0553] In some embodiments, the immunogenic vaccine is administered chronologically before the PI3 kinase inhibitor, e.g., Wortmannin, Demethoxyviridin, LY294002, hibiscone C, Idelalisib, Copanlisib, Duvelisib, Taselisib, Perifosine, Buparlisib, Duvelisib, Alpelisib (BYL719), Umbralisib, (TGR 1202), Copanlisib (BAY 80-6946), PX-866, Dactolisib, CUDC-907, Voxtalisib (SAR245409, XL765), CUDC-907, ME-401, IPI-549, SF1126, RP6530, INK1117, pictilisib (GDC-0941), XL147 (SAR245408), Palomid 529, GSK1059615, ZSTK474, PWT33597, IC87114, TG100-115, CAL263, RP6503, PI-103, GNE-477 or AEZS-136. In some embodiments, the immunogenic vaccine is administered from 1-24 hours, 2-24 hours, 3-24 hours, 4-24 hours, 5-24 hours, 6-24 hours, 7-24 hours, 8-24 hours, 9-24 hours, 10-24 hours, 11-24 hours, 12-24 hours, 1-30 days, 2-30 days, 3-30 days, 4-30 days, 5-30 days, 6-30 days, 7-30 days, 8-30 days, 9,-30 days, 10-30 days, 11-30 days, 12-30 days, 13-30 days, 14-30 days, 15-30 days, 16-30 days, 17-30 days, 18-30 days, 19-30 days, 20-30 days, 21-30 days, 22-30 days, 23-30 days, 24-30 days, 25-30 days, 26-30 days, 27-30 days, 28-30 days, 29-30 days, 1-4 week, 2-4 weeks, 3-4 weeks, 1-12 months, 2-12 months, 3-12 months, 4-12 months, 5-12 months, 6-12 months, 7-12 months, 8-12 months, 9-12 months, 10-12 months, 11-12 months, or any combination thereof, before the PI3 kinase inhibitor is administered. In some embodiments, the immunogenic vaccine is administered at least 1 hour, 2 hours, 3 hours, 4 hours, 5 hours, 6 hours, 7 hours, 8 hours, 9 hours, 10 hours, 11 hours, 12 hours, 1 day, 2 days, 3 days, 4 days, 5 days, 6 days, 7 days, 8 days, 9, days, 10 days, 11 days, 12 days, 13 days, 14 days, 15 days, 16 days, 17 days, 18 days, 19 days, 20 days, 21 days, 22 days, 23 days, 24 days, 25 days, 26 days, 27 days, 28 days, 29 days, 1 week, 2 weeks, three weeks, 4 weeks, 1 month, 2 months, 3 months, 4 months, 5 months, 6 months, 7 months, 8 months, 9 months, 10 months, 11 months, 12 months, or any combination thereof, before the PI3 kinase inhibitor is administered. For example, the immunogenic vaccine can be administered at least 1 hour, 2 hours, 3 hours, 4 hours, 5 hours, 6 hours, 7 hours, 8 hours, 9 hours, 10 hours, 11 hours, 12 hours, 1 day, 2 days, 3 days, 4 days, 5 days, 6 days, 7 days, 8 days, 9, days, 10 days, 11 days, 12 days, 13 days, 14 days, 15 days, 16 days, 17 days, 18 days, 19 days, 20 days, 21 days, 22 days, 23 days, 24 days, 25 days, 26 days, 27 days, 28 days, 29 days, 1 week, 2 weeks, three weeks, 4 weeks, 1 month, 2 months, 3 months, 4 months, 5 months, 6 months, 7 months, 8 months, 9 months, 10 months, 11 months, 12 months, or any combination thereof, before Wortmannin, Demethoxyviridin, LY294002, hibiscone C, Idelalisib, Copanlisib, Duvelisib, Taselisib, Perifosine, Buparlisib, Duvelisib, Alpelisib (BYL719), Umbralisib, (TGR 1202), Copanlisib (BAY 80-6946), PX-866, Dactolisib, CUDC-907, Voxtalisib (SAR245409, XL765), CUDC-907, ME-401, IPI-549, SF1126, RP6530, INK1117, pictilisib (GDC-0941), XL147 (SAR245408), Palomid 529, GSK1059615, ZSTK474, PWT33597, IC87114, TG100-115, CAL263, RP6503, PI-103, GNE-477 or AEZS-136, is administered.

[0554] In some embodiments, the immunogenic vaccine is administered at most 1 hour, 2 hours, 3 hours, 4 hours, 5 hours, 6 hours, 7 hours, 8 hours, 9 hours, 10 hours, 11 hours, 12 hours, 1 day, 2 days, 3 days, 4 days, 5 days, 6 days, 7 days, 8 days, 9, days, 10 days, 11 days, 12 days, 13 days, 14 days, 15 days, 16 days, 17 days, 18 days, 19 days, 20 days, 21 days, 22 days, 23 days, 24 days, 25 days, 26 days, 27 days, 28 days, 29 days, 1 week, 2 weeks, three weeks, 4 weeks, 1 month, 2 months, 3 months, 4 months, 5 months, 6 months, 7 months, 8 months, 9 months, 10 months, 11 months, 12 months, or any combination thereof, before the PI3 kinase inhibitor is administered. For example, the immunogenic vaccine can be administered at most 1 hour, 2 hours, 3 hours, 4 hours, 5 hours, 6 hours, 7 hours, 8 hours, 9 hours, 10 hours, 11 hours, 12 hours, 1 day, 2 days, 3 days, 4 days, 5 days, 6 days, 7 days, 8 days, 9, days, 10 days, 11 days, 12 days, 13 days, 14 days, 15 days, 16 days, 17 days, 18 days, 19 days, 20 days, 21 days, 22 days, 23 days, 24 days, 25 days, 26 days, 27 days, 28 days, 29 days, 1 week, 2 weeks, three weeks, 4 weeks, 1 month, 2 months, 3 months, 4 months, 5 months, 6 months, 7 months, 8 months, 9 months, 10 months, 11 months, 12 months, or any combination thereof, before Wortmannin, Demethoxyviridin, LY294002, hibiscone C, Idelalisib, Copanlisib, Duvelisib, Taselisib, Perifosine, Buparlisib, Duvelisib, Alpelisib (BYL719), Umbralisib, (TGR 1202), Copanlisib (BAY 80-6946), PX-866, Dactolisib, CUDC-907, Voxtalisib (SAR245409, XL765), CUDC-907, ME-401, IPI-549, SF1126, RP6530, INK1117, pictilisib (GDC-0941), XL147 (SAR245408), Palomid 529, GSK1059615, ZSTK474, PWT33597, IC87114, TG100-115, CAL263, RP6503, PI-103, GNE-477 or AEZS-136, is administered.

[0555] In some embodiments, the immunogenic vaccine is administered about 1 hour, 2 hours, 3 hours, 4 hours, 5 hours, 6 hours, 7 hours, 8 hours, 9 hours, 10 hours, 11 hours, 12 hours, 1 day, 2 days, 3 days, 4 days, 5 days, 6 days, 7 days, 8 days, 9, days, 10 days, 11 days, 12 days, 13 days, 14 days, 15 days, 16 days, 17 days, 18 days, 19 days, 20 days, 21 days, 22 days, 23 days, 24 days, 25 days, 26 days, 27 days, 28 days, 29 days, 1 week, 2 weeks, three weeks, 4 weeks, 1 month, 2 months, 3 months, 4 months, 5 months, 6 months, 7 months, 8 months, 9 months, 10 months, 11 months, 12 months, or any combination thereof, before the PI3 kinase inhibitor is administered. For example, the immunogenic vaccine can be administered about 1 hour, 2 hours, 3 hours, 4 hours, 5 hours, 6 hours, 7 hours, 8 hours, 9 hours, 10 hours, 11 hours, 12 hours, 1 day, 2 days, 3 days, 4 days, 5 days, 6 days, 7 days, 8 days, 9, days, 10 days, 11 days, 12 days, 13 days, 14 days, 15 days, 16 days, 17 days, 18 days, 19 days, 20 days, 21 days, 22 days, 23 days, 24 days, 25 days, 26 days, 27 days, 28 days, 29 days, 1 week, 2 weeks, three weeks, 4 weeks, 1 month, 2 months, 3 months, 4 months, 5 months, 6 months, 7 months, 8 months, 9 months, 10 months, 11 months, 12 months, or any combination thereof, before Wortmannin, Demethoxyviridin, LY294002, hibiscone C, Idelalisib, Copanlisib, Duvelisib, Taselisib, Perifosine, Buparlisib, Duvelisib, Alpelisib (BYL719), Umbralisib, (TGR 1202), Copanlisib (BAY 80-6946), PX-866, Dactolisib, CUDC-907, Voxtalisib (SAR245409, XL765), CUDC-907, ME-401, IPI-549, SF1126, RP6530, INK1117, pictilisib (GDC-0941), XL147 (SAR245408), Palomid 529, GSK1059615, ZSTK474, PWT33597, IC87114, TG100-115, CAL263, RP6503, PI-103, GNE-477 or AEZS-136, is administered.

[0556] In some embodiments, the immunogenic vaccine is administered chronologically at the same time as the at least one additional pharmaceutically active agent.

[0557] In some embodiments, the immunogenic vaccine is administered chronologically after the PI3 kinase inhibitor, e.g., Wortmannin, Demethoxyviridin, LY294002, hibiscone C, Idelalisib, Copanlisib, Duvelisib, Taselisib, Perifosine, Buparlisib, Duvelisib, Alpelisib (BYL719), Umbralisib, (TGR 1202), Copanlisib (BAY 80-6946), PX-866, Dactolisib, CUDC-907, Voxtalisib (SAR245409, XL765), CUDC-907, ME-401, IPI-549, SF1126, RP6530, INK1117, pictilisib (GDC-0941), XL147 (SAR245408), Palomid 529, GSK1059615, ZSTK474, PWT33597, IC87114, TG100-115, CAL263, RP6503, PI-103, GNE-477 or AEZS-136. In some embodiments, the PI3 kinase inhibitor is administered from 1-24 hours, 2-24 hours, 3-24 hours, 4-24 hours, 5-24 hours, 6-24 hours, 7-24 hours, 8-24 hours, 9-24 hours, 10-24 hours, 11-24 hours, 12-24 hours, 1-30 days, 2-30 days, 3-30 days, 4-30 days, 5-30 days, 6-30 days, 7-30 days, 8-30 days, 9,-30 days, 10-30 days, 11-30 days, 12-30 days, 13-30 days, 14-30 days, 15-30 days, 16-30 days, 17-30 days, 18-30 days, 19-30 days, 20-30 days, 21-30 days, 22-30 days, 23-30 days, 24-30 days, 25-30 days, 26-30 days, 27-30 days, 28-30 days, 29-30 days, 1-4 week, 2-4 weeks, 3-4 weeks, 1-12 months, 2-12 months, 3-12 months, 4-12 months, 5-12 months, 6-12 months, 7-12 months, 8-12 months, 9-12 months, 10-12 months, 11-12 months, or any combination thereof, before the immunogenic vaccine is administered. In some embodiments the PI3 kinase inhibitor is administered at least 1 hour, 2 hours, 3 hours, 4 hours, 5 hours, 6 hours, 7 hours, 8 hours, 9 hours, 10 hours, 11 hours, 12 hours, 1 day, 2 days, 3 days, 4 days, 5 days, 6 days, 7 days, 8 days, 9, days, 10 days, 11 days, 12 days, 13 days, 14 days, 15 days, 16 days, 17 days, 18 days, 19 days, 20 days, 21 days, 22 days, 23 days, 24 days, 25 days, 26 days, 27 days, 28 days, 29 days, 30 days, 1 week, 2 weeks, three weeks, 4 weeks, 1 month, 2 months, 3 months, 4 months, 5 months, 6 months, 7 months, 8 months, 9 months, 10 months, 11 months, 12 months, or any combination thereof, before the immunogenic vaccine is administered. For example, Wortmannin, Demethoxyviridin, LY294002, hibiscone C, Idelalisib, Copanlisib, Duvelisib, Taselisib, Perifosine, Buparlisib, Duvelisib, Alpelisib (BYL719), Umbralisib, (TGR 1202), Copanlisib (BAY 80-6946), PX-866, Dactolisib, CUDC-907, Voxtalisib (SAR245409, XL765), CUDC-907, ME-401, IPI-549, SF1126, RP6530, INK1117, pictilisib (GDC-0941), XL147 (SAR245408), Palomid 529, GSK1059615, ZSTK474, PWT33597, IC87114, TG100-115, CAL263, RP6503, PI-103, GNE-477 or AEZS-136, can be administered at least 1 hour, 2 hours, 3 hours, 4 hours, 5 hours, 6 hours, 7 hours, 8 hours, 9 hours, 10 hours, 11 hours, 12 hours, 1 day, 2 days, 3 days, 4 days, 5 days, 6 days, 7 days, 8 days, 9, days, 10 days, 11 days, 12 days, 13 days, 14 days, 15 days, 16 days, 17 days, 18 days, 19 days, 20 days, 21 days, 22 days, 23 days, 24 days, 25 days, 26 days, 27 days, 28 days, 29 days, 30 days, 1 week, 2 weeks, 3 weeks, 4 weeks, 1 month, 2 months, 3 months, 4 months, 5 months, 6 months, 7 months, 8 months, 9 months, 10 months, 11 months, 12 months, or any combination thereof, before the immunogenic vaccine is administered.

[0558] In some embodiments the PI3 kinase inhibitor is administered at most 1 hour, 2 hours, 3 hours, 4 hours, 5 hours, 6 hours, 7 hours, 8 hours, 9 hours, 10 hours, 11 hours, 12 hours, 1 day, 2 days, 3 days, 4 days, 5 days, 6 days, 7 days, 8 days, 9, days, 10 days, 11 days, 12 days, 13 days, 14 days, 15 days, 16 days, 17 days, 18 days, 19 days, 20 days, 21 days, 22 days, 23 days, 24 days, 25 days, 26 days, 27 days, 28 days, 29 days, 30 days, 1 week, 2 weeks, three weeks, 4 weeks, 1 month, 2 months, 3 months, 4 months, 5 months, 6 months, 7 months, 8 months, 9 months, 10 months, 11 months, 12 months, or any combination thereof, before the immunogenic vaccine is administered. For example, Wortmannin, Demethoxyviridin, LY294002, hibiscone C, Idelalisib, Copanlisib, Duvelisib, Taselisib, Perifosine, Buparlisib, Duvelisib, Alpelisib (BYL719), Umbralisib, (TGR 1202), Copanlisib (BAY 80-6946), PX-866, Dactolisib, CUDC-907, Voxtalisib (SAR245409, XL765), CUDC-907, ME-401, IPI-549, SF1126, RP6530, INK1117, pictilisib (GDC-0941), XL147 (SAR245408), Palomid 529, GSK1059615, ZSTK474, PWT33597, IC87114, TG100-115, CAL263, RP6503, PI-103, GNE-477 or AEZS-136, can be administered at most 1 hour, 2 hours, 3 hours, 4 hours, 5 hours, 6 hours, 7 hours, 8 hours, 9 hours, 10 hours, 11 hours, 12 hours, 1 day, 2 days, 3 days, 4 days, 5 days, 6 days, 7 days, 8 days, 9, days, 10 days, 11 days, 12 days, 13 days, 14 days, 15 days, 16 days, 17 days, 18 days, 19 days, 20 days, 21 days, 22 days, 23 days, 24 days, 25 days, 26 days, 27 days, 28 days, 29 days, 30 days, 1 week, 2 weeks, 3 weeks, 4 weeks, 1 month, 2 months, 3 months, 4 months, 5 months, 6 months, 7 months, 8 months, 9 months, 10 months, 11 months, 12 months, or any combination thereof, before the immunogenic vaccine is administered.

[0559] In some embodiments the PI3 kinase inhibitor is administered about 1 hour, 2 hours, 3 hours, 4 hours, 5 hours, 6 hours, 7 hours, 8 hours, 9 hours, 10 hours, 11 hours, 12 hours, 1 day, 2 days, 3 days, 4 days, 5 days, 6 days, 7 days, 8 days, 9, days, 10 days, 11 days, 12 days, 13 days, 14 days, 15 days, 16 days, 17 days, 18 days, 19 days, 20 days, 21 days, 22 days, 23 days, 24 days, 25 days, 26 days, 27 days, 28 days, 29 days, 30 days, 1 week, 2 weeks, three weeks, 4 weeks, 1 month, 2 months, 3 months, 4 months, 5 months, 6 months, 7 months, 8 months, 9 months, 10 months, 11 months, 12 months, or any combination thereof, before the immunogenic vaccine is administered. For example, Wortmannin, Demethoxyviridin, LY294002, hibiscone C, Idelalisib, Copanlisib, Duvelisib, Taselisib, Perifosine, Buparlisib, Duvelisib, Alpelisib (BYL719), Umbralisib, (TGR 1202), Copanlisib (BAY 80-6946), PX-866, Dactolisib, CUDC-907, Voxtalisib (SAR245409, XL765), CUDC-907, ME-401, IPI-549, SF1126, RP6530, INK1117, pictilisib (GDC-0941), XL147 (SAR245408), Palomid 529, GSK1059615, ZSTK474, PWT33597, IC87114, TG100-115, CAL263, RP6503, PI-103, GNE-477 or AEZS-136, can be administered about 1 hour, 2 hours, 3 hours, 4 hours, 5 hours, 6 hours, 7 hours, 8 hours, 9 hours, 10 hours, 11 hours, 12 hours, 1 day, 2 days, 3 days, 4 days, 5 days, 6 days, 7 days, 8 days, 9, days, 10 days, 11 days, 12 days, 13 days, 14 days, 15 days, 16 days, 17 days, 18 days, 19 days, 20 days, 21 days, 22 days, 23 days, 24 days, 25 days, 26 days, 27 days, 28 days, 29 days, 30 days, 1 week, 2 weeks, 3 weeks, 4 weeks, 1 month, 2 months, 3 months, 4 months, 5 months, 6 months, 7 months, 8 months, 9 months, 10 months, 11 months, 12 months, or any combination thereof, before the immunogenic vaccine is administered.

[0560] In some embodiments, provided herein is a method of treating a condition or disease comprising administering to a patient in need thereof a therapeutically effective amount of a immunogenic vaccine, in combination with a therapeutically effective amount of a PI3 kinase inhibitor. For example, provided herein is a method of treating a condition or disease comprising administering to a patient in need thereof a therapeutically effective amount of a immunogenic vaccine, in combination with a therapeutically effective amount of Wortmannin, Demethoxyviridin, LY294002, hibiscone C, Idelalisib, Copanlisib, Duvelisib, Taselisib, Perifosine, Buparlisib, Duvelisib, Alpelisib (BYL719), Umbralisib, (TGR 1202), Copanlisib (BAY 80-6946), PX-866, Dactolisib, CUDC-907, Voxtalisib (SAR245409, XL765), CUDC-907, ME-401, IPI-549, SF1126, RP6530, INK1117, pictilisib (GDC-0941), XL147 (SAR245408), Palomid 529, GSK1059615, ZSTK474, PWT33597, IC87114, TG100-115, CAL263, RP6503, PI-103, GNE-477 or AEZS-136.

[0561] In some embodiments, a immunogenic vaccine is administered once, twice, or thrice daily for 2, 3, 4, 5, 6, 7, 8, 9, 10, 11, 12, 13, 14, 15, 16, 17, 18, 19, 20, 21, 22, 23, 24, 25, 26, 27, 28, 29, or 30, consecutive days followed by 1, 2, 3, 4, 5, 6, 7, 8, 9, 10, 11, 12, 13, 14, 15, 16, 17, 18, 19, 20, 21, 22, 23, 24, 25, 26, 27, 28, 29, or 30 days of rest (e.g., no administration of the immunogenic vaccine/discontinuation of treatment) in a 1, 2, 3, 4, 5, 6, 7, 8, 9, 10, 11, 12, 13, 14, 15, 16, 17, 18, 19, 20, 21, 22, 23, 24, 25, 26, 27, or 28 day cycle; and the PI3 kinase inhibitor (e.g., Wortmannin, Demethoxyviridin, LY294002, hibiscone C, Idelalisib, Copanlisib, Duvelisib, Taselisib, Perifosine, Buparlisib, Duvelisib, Alpelisib (BYL719), Umbralisib, (TGR 1202), Copanlisib (BAY 80-6946), PX-866, Dactolisib, CUDC-907, Voxtalisib (SAR245409, XL765), CUDC-907, ME-401, IPI-549, SF1126, RP6530, INK1117, pictilisib (GDC-0941), XL147 (SAR245408), Palomid 529, GSK1059615, ZSTK474, PWT33597, IC87114, TG100-115, CAL263, RP6503, PI-103, GNE-477 or AEZS-136) is administered prior to, concomitantly with, or subsequent to administration of the immunogenic vaccine on one or more days (e.g., on day 1 of cycle 1). In some embodiments, the combination therapy is administered for 1, 2, 3, 4, 5, 6, 7, 8, 9, 10, 12, or 13 cycles of 1, 2, 3, 4, 5, 6, 7, 8, 9, 10, 11, 12, 13, 14, 15, 16, 17, 18, 19, 20, 21, 22, 23, 24, 25, 26, 27, or 28 days. In some embodiments, the combination therapy is administered for 1 to 12 or 13 cycles of 28 days (e.g., about 12 months).

[0562] In some embodiments, provided herein is a method of treating a condition or disease comprising administering to a patient in need thereof a therapeutically effective amount of a immunogenic vaccine in combination with a therapeutically effective amount of a PI3 kinase inhibitor, e.g., Wortmannin, Demethoxyviridin, LY294002, hibiscone C, Idelalisib, Copanlisib, Duvelisib, Taselisib, Perifosine, Buparlisib, Duvelisib, Alpelisib (BYL719), Umbralisib, (TGR 1202), Copanlisib (BAY 80-6946), PX-866, Dactolisib, CUDC-907, Voxtalisib (SAR245409, XL765), CUDC-907, ME-401, IPI-549, SF1126, RP6530, INK1117, pictilisib (GDC-0941), XL147 (SAR245408), Palomid 529, GSK1059615, ZSTK474, PWT33597, IC87114, TG100-115, CAL263, RP6503, PI-103, GNE-477 or AEZS-136, and a secondary active agent, such as a checkpoint inhibitor. In some embodiments, a immunogenic vaccine is administered once, twice, or thrice daily for 2, 3, 4, 5, 6, 7, 8, 9, 10, 11, 12, 13, 14, 15, 16, 17, 18, 19, 20, 21, 22, 23, 24, 25, 26, 27, 28, 29, or 30, consecutive days followed by 1, 2, 3, 4, 5, 6, 7, 8, 9, 10, 11, 12, 13, 14, 15, 16, 17, 18, 19, 20, 21, 22, 23, 24, 25, 26, 27, 28, 29, or 30 days of rest (e.g., no administration of the immunogenic vaccine/discontinuation of treatment) in a 1, 2, 3, 4, 5, 6, 7, 8, 9, 10, 11, 12, 13, 14, 15, 16, 17, 18, 19, 20, 21, 22, 23, 24, 25, 26, 27, or 28 day cycle; the PI3 kinase inhibitor (e.g., Wortmannin, Demethoxyviridin, LY294002, hibiscone C, Idelalisib, Copanlisib, Duvelisib, Taselisib, Perifosine, Buparlisib, Duvelisib, Alpelisib (BYL719), Umbralisib, (TGR 1202), Copanlisib (BAY 80-6946), PX-866, Dactolisib, CUDC-907, Voxtalisib (SAR245409, XL765), CUDC-907, ME-401, IPI-549, SF1126, RP6530, INK1117, pictilisib (GDC-0941), XL147 (SAR245408), Palomid 529, GSK1059615, ZSTK474, PWT33597, IC87114, TG100-115, CAL263, RP6503, PI-103, GNE-477 or AEZS-136) is administered prior to, concomitantly with, or subsequent to administration of the immunogenic vaccine on one or more days (e.g., on day 1 of cycle 1), and the secondary agent is administered daily, weekly, or monthly. In some embodiments, the combination therapy is administered for 1, 2, 3, 4, 5, 6, 7, 8, 9, 10, 12, or 13 cycles of 1, 2, 3, 4, 5, 6, 7, 8, 9, 10, 11, 12, 13, 14, 15, 16, 17, 18, 19, 20, 21, 22, 23, 24, 25, 26, 27, or 28 days. In some embodiments, the combination therapy is administered for 1 to 12 or 13 cycles of 28 days (e.g., about 12 months).

[0563] In some embodiments, the immunogenic vaccine may be used in combination with inhibitors of the cyclin-dependent kinases, for example with an inhibitor of CDK4 and/or CDK6. An example of such inhibitor that may be used in combination with the instant immunogenic vaccine is palbociclib (IBRANCE) (see, e.g., Clin. Cancer Res.; 2015, 21(13); 2905-10). An example of such inhibitor that may be used in combination with the instant immunogenic vaccine is ribociclib. An example of such inhibitor that may be used in combination with the instant immunogenic vaccine is abemaciclib. An example of such inhibitor that may be used in combination with the instant immunogenic vaccine is seliciclib. An example of such inhibitor that may be used in combination with the instant immunogenic vaccine is dinaciclib. An example of such inhibitor that may be used in combination with the instant immunogenic vaccine is milciclib. An example of such inhibitor that may be used in combination with the instant immunogenic vaccine is roniciclib. An example of such inhibitor that may be used in combination with the instant immunogenic vaccine is atuveciclib. An example of such inhibitor that may be used in combination with the instant immunogenic vaccine is briciclib. An example of such inhibitor that may be used in combination with the instant immunogenic vaccine is riviciclib. An example of such inhibitor that may be used in combination with the instant immunogenic vaccine is seliciclib. An example of such inhibitor that may be used in combination with the instant immunogenic vaccine is trilaciclib. An example of such inhibitor that may be used in combination with the instant immunogenic vaccine is voruciclib. In some examples, the immunogenic vaccines of the disclosure may be used in combination with an inhibitor of CDK4 and/or CDK6 and with an agent that reinforces the cytostatic activity of CDK4/6 inhibitors and/or with an agent that converts reversible cytostasis into irreversible growth arrest or cell death. Exemplary cancer subtypes include NSCLC, melanoma, neuroblastoma, glioblastoma, liposarcoma, and mantle cell lymphoma.

[0564] In some embodiments, doses of the cyclin dependent kinase inhibitor, e.g., seliciclib, ribociclib, abemaciclib, or palbociclib employed for human treatment can be in the range of about 0.01 mg/kg to about 100 mg/kg per day (e.g., about 0.1 mg/kg to about 100 mg/kg per day, about 0.1 mg/kg to about 50 mg/kg per day, about 10 mg/kg per day or about 30 mg/kg per day). The desired dose may be conveniently administered in a single dose, or as multiple doses administered at appropriate intervals, for example as two, three, four or more sub-doses per day.

[0565] In some embodiments, the dosage of the cyclin dependent kinase inhibitor, e.g., seliciclib, ribociclib, abemaciclib, or palbociclib may be from about 1 ng/kg to about 100 mg/kg. The dosage of the cyclin dependent kinase inhibitor, e.g., seliciclib, ribociclib, abemaciclib, or palbociclib may be at any dosage including, but not limited to, about 1 μg/kg, 25 μg/kg, 50 μg/kg, 75 μg/kg, 100 μμg/kg, 125 μg/kg, 150 μg/kg, 175 μg/kg, 200 μg/kg, 225 μg/kg, 250 μg/kg, 275 μg/kg, 300 μg/kg, 325 μg/kg, 350 μg/kg, 375 μg/kg, 400 μg/kg, 425 μg/kg, 450 μg/kg, 475 μg/kg, 500 μg/kg, 525 μg/kg, 550 μg/kg, 575 μg/kg, 600 μg/kg, 625 μg/kg, 650 μg/kg, 675 μg/kg, 700 μg/kg, 725 μg/kg, 750 μg/kg, 775 μg/kg, 800 μg/kg, 825 μg/kg, 850 μg/kg, 875 μg/kg, 900 μg/kg, 925 μg/kg, 950 μg/kg, 975 μg/kg, 1 mg/kg, 2.5 mg/kg, 5 mg/kg, 10 mg/kg, 15 mg/kg, 20 mg/kg, 25 mg/kg, 30 mg/kg, 35 mg/kg, 40 mg/kg, 45 mg/kg, 50 mg/kg, 60 mg/kg, 70 mg/kg, 80 mg/kg, 90 mg/kg, or 100 mg/kg.

[0566] The mode of administration of the immunogenic vaccine and the cyclin dependent kinase inhibitor, e.g., seliciclib, ribociclib, abemaciclib, or palbociclib may be simultaneously or sequentially, wherein the immunogenic vaccine and the at least one additional pharmaceutically active agent are sequentially (or separately) administered. For example, the immunogenic vaccine and the cyclin dependent kinase inhibitor, e.g., seliciclib, ribociclib, abemaciclib, or palbociclib may be provided in a single unit dosage form for being taken together or as separate entities (e.g. in separate containers) to be administered simultaneously or with a certain time difference. This time difference may be between 1 hour and 1 month, e.g., between 1 day and 1 week, e.g., 48 hours and 3 days. In addition, it is possible to administer the immunogenic vaccine via another administration way than the cyclin dependent kinase inhibitor, e.g., seliciclib, ribociclib, abemaciclib, or palbociclib. For example, it may be advantageous to administer either the immunogenic vaccine or the cyclin dependent kinase inhibitor, e.g., seliciclib, ribociclib, abemaciclib, or palbociclib intravenously and the other systemically or orally. For example, the immunogenic vaccine is administered intravenously or subcutaneously and the cyclin dependent kinase inhibitor, e.g., seliciclib, ribociclib, abemaciclib, or palbociclib orally.

[0567] In some embodiments, the immunogenic vaccine is administered chronologically before the cyclin dependent kinase inhibitor, e.g., seliciclib, ribociclib, abemaciclib, or palbociclib. In some embodiments, the immunogenic vaccine is administered from 1-24 hours, 2-24 hours, 3-24 hours, 4-24 hours, 5-24 hours, 6-24 hours, 7-24 hours, 8-24 hours, 9-24 hours, 10-24 hours, 11-24 hours, 12-24 hours, 1-30 days, 2-30 days, 3-30 days, 4-30 days, 5-30 days, 6-30 days, 7-30 days, 8-30 days, 9,-30 days, 10-30 days, 11-30 days, 12-30 days, 13-30 days, 14-30 days, 15-30 days, 16-30 days, 17-30 days, 18-30 days, 19-30 days, 20-30 days, 21-30 days, 22-30 days, 23-30 days, 24-30 days, 25-30 days, 26-30 days, 27-30 days, 28-30 days, 29-30 days, 1-4 week, 2-4 weeks, 3-4 weeks, 1-12 months, 2-12 months, 3-12 months, 4-12 months, 5-12 months, 6-12 months, 7-12 months, 8-12 months, 9-12 months, 10-12 months, 11-12 months, or any combination thereof, before the cyclin dependent kinase inhibitor is administered. In some embodiments, the immunogenic vaccine is administered at least 1 hour, 2 hours, 3 hours, 4 hours, 5 hours, 6 hours, 7 hours, 8 hours, 9 hours, 10 hours, 11 hours, 12 hours, 1 day, 2 days, 3 days, 4 days, 5 days, 6 days, 7 days, 8 days, 9, days, 10 days, 11 days, 12 days, 13 days, 14 days, 15 days, 16 days, 17 days, 18 days, 19 days, 20 days, 21 days, 22 days, 23 days, 24 days, 25 days, 26 days, 27 days, 28 days, 29 days, 1 week, 2 weeks, three weeks, 4 weeks, 1 month, 2 months, 3 months, 4 months, 5 months, 6 months, 7 months, 8 months, 9 months, 10 months, 11 months, 12 months, or any combination thereof, before the cyclin dependent kinase inhibitor is administered. For example, the immunogenic vaccine can be administered at least 1 hour, 2 hours, 3 hours, 4 hours, 5 hours, 6 hours, 7 hours, 8 hours, 9 hours, 10 hours, 11 hours, 12 hours, 1 day, 2 days, 3 days, 4 days, 5 days, 6 days, 7 days, 8 days, 9, days, 10 days, 11 days, 12 days, 13 days, 14 days, 15 days, 16 days, 17 days, 18 days, 19 days, 20 days, 21 days, 22 days, 23 days, 24 days, 25 days, 26 days, 27 days, 28 days, 29 days, 1 week, 2 weeks, three weeks, 4 weeks, 1 month, 2 months, 3 months, 4 months, 5 months, 6 months, 7 months, 8 months, 9 months, 10 months, 11 months, 12 months, or any combination thereof, before seliciclib, ribociclib, abemaciclib, or palbociclib is administered.

[0568] In some embodiments, the immunogenic vaccine is administered at most 1 hour, 2 hours, 3 hours, 4 hours, 5 hours, 6 hours, 7 hours, 8 hours, 9 hours, 10 hours, 11 hours, 12 hours, 1 day, 2 days, 3 days, 4 days, 5 days, 6 days, 7 days, 8 days, 9, days, 10 days, 11 days, 12 days, 13 days, 14 days, 15 days, 16 days, 17 days, 18 days, 19 days, 20 days, 21 days, 22 days, 23 days, 24 days, 25 days, 26 days, 27 days, 28 days, 29 days, 1 week, 2 weeks, three weeks, 4 weeks, 1 month, 2 months, 3 months, 4 months, 5 months, 6 months, 7 months, 8 months, 9 months, 10 months, 11 months, 12 months, or any combination thereof, before the cyclin dependent kinase inhibitor is administered. For example, the immunogenic vaccine can be administered at most 1 hour, 2 hours, 3 hours, 4 hours, 5 hours, 6 hours, 7 hours, 8 hours, 9 hours, 10 hours, 11 hours, 12 hours, 1 day, 2 days, 3 days, 4 days, 5 days, 6 days, 7 days, 8 days, 9, days, 10 days, 11 days, 12 days, 13 days, 14 days, 15 days, 16 days, 17 days, 18 days, 19 days, 20 days, 21 days, 22 days, 23 days, 24 days, 25 days, 26 days, 27 days, 28 days, 29 days, 1 week, 2 weeks, three weeks, 4 weeks, 1 month, 2 months, 3 months, 4 months, 5 months, 6 months, 7 months, 8 months, 9 months, 10 months, 11 months, 12 months, or any combination thereof, before seliciclib, ribociclib, abemaciclib, or palbociclib is administered.

[0569] In some embodiments, the immunogenic vaccine is administered about 1 hour, 2 hours, 3 hours, 4 hours, 5 hours, 6 hours, 7 hours, 8 hours, 9 hours, 10 hours, 11 hours, 12 hours, 1 day, 2 days, 3 days, 4 days, 5 days, 6 days, 7 days, 8 days, 9, days, 10 days, 11 days, 12 days, 13 days, 14 days, 15 days, 16 days, 17 days, 18 days, 19 days, 20 days, 21 days, 22 days, 23 days, 24 days, 25 days, 26 days, 27 days, 28 days, 29 days, 1 week, 2 weeks, three weeks, 4 weeks, 1 month, 2 months, 3 months, 4 months, 5 months, 6 months, 7 months, 8 months, 9 months, 10 months, 11 months, 12 months, or any combination thereof, before the cyclin dependent kinase inhibitor is administered. For example, the immunogenic vaccine can be administered about 1 hour, 2 hours, 3 hours, 4 hours, 5 hours, 6 hours, 7 hours, 8 hours, 9 hours, 10 hours, 11 hours, 12 hours, 1 day, 2 days, 3 days, 4 days, 5 days, 6 days, 7 days, 8 days, 9, days, 10 days, 11 days, 12 days, 13 days, 14 days, 15 days, 16 days, 17 days, 18 days, 19 days, 20 days, 21 days, 22 days, 23 days, 24 days, 25 days, 26 days, 27 days, 28 days, 29 days, 1 week, 2 weeks, three weeks, 4 weeks, 1 month, 2 months, 3 months, 4 months, 5 months, 6 months, 7 months, 8 months, 9 months, 10 months, 11 months, 12 months, or any combination thereof, before seliciclib, ribociclib, abemaciclib, or palbociclib is administered.

[0570] In some embodiments, the immunogenic vaccine is administered chronologically at the same time as the at least one additional pharmaceutically active agent.

[0571] In some embodiments, the immunogenic vaccine is administered chronologically after the cyclin dependent kinase inhibitor, e.g., seliciclib, ribociclib, abemaciclib, or palbociclib. In some embodiments, the cyclin dependent kinase inhibitor is administered from 1-24 hours, 2-24 hours, 3-24 hours, 4-24 hours, 5-24 hours, 6-24 hours, 7-24 hours, 8-24 hours, 9-24 hours, 10-24 hours, 11-24 hours, 12-24 hours, 1-30 days, 2-30 days, 3-30 days, 4-30 days, 5-30 days, 6-30 days, 7-30 days, 8-30 days, 9,-30 days, 10-30 days, 11-30 days, 12-30 days, 13-30 days, 14-30 days, 15-30 days, 16-30 days, 17-30 days, 18-30 days, 19-30 days, 20-30 days, 21-30 days, 22-30 days, 23-30 days, 24-30 days, 25-30 days, 26-30 days, 27-30 days, 28-30 days, 29-30 days, 1-4 week, 2-4 weeks, 3-4 weeks, 1-12 months, 2-12 months, 3-12 months, 4-12 months, 5-12 months, 6-12 months, 7-12 months, 8-12 months, 9-12 months, 10-12 months, 11-12 months, or any combination thereof, before the immunogenic vaccine is administered. In some embodiments the cyclin dependent kinase inhibitor is administered at least 1 hour, 2 hours, 3 hours, 4 hours, 5 hours, 6 hours, 7 hours, 8 hours, 9 hours, 10 hours, 11 hours, 12 hours, 1 day, 2 days, 3 days, 4 days, 5 days, 6 days, 7 days, 8 days, 9, days, 10 days, 11 days, 12 days, 13 days, 14 days, 15 days, 16 days, 17 days, 18 days, 19 days, 20 days, 21 days, 22 days, 23 days, 24 days, 25 days, 26 days, 27 days, 28 days, 29 days, 30 days, 1 week, 2 weeks, three weeks, 4 weeks, 1 month, 2 months, 3 months, 4 months, 5 months, 6 months, 7 months, 8 months, 9 months, 10 months, 11 months, 12 months, or any combination thereof, before the immunogenic vaccine is administered. For example, seliciclib, ribociclib, abemaciclib, or palbociclib can be administered at least 1 hour, 2 hours, 3 hours, 4 hours, 5 hours, 6 hours, 7 hours, 8 hours, 9 hours, 10 hours, 11 hours, 12 hours, 1 day, 2 days, 3 days, 4 days, 5 days, 6 days, 7 days, 8 days, 9, days, 10 days, 11 days, 12 days, 13 days, 14 days, 15 days, 16 days, 17 days, 18 days, 19 days, 20 days, 21 days, 22 days, 23 days, 24 days, 25 days, 26 days, 27 days, 28 days, 29 days, 30 days, 1 week, 2 weeks, 3 weeks, 4 weeks, 1 month, 2 months, 3 months, 4 months, 5 months, 6 months, 7 months, 8 months, 9 months, 10 months, 11 months, 12 months, or any combination thereof, before the immunogenic vaccine is administered.

[0572] In some embodiments the cyclin dependent kinase inhibitor is administered at most 1 hour, 2 hours, 3 hours, 4 hours, 5 hours, 6 hours, 7 hours, 8 hours, 9 hours, 10 hours, 11 hours, 12 hours, 1 day, 2 days, 3 days, 4 days, 5 days, 6 days, 7 days, 8 days, 9, days, 10 days, 11 days, 12 days, 13 days, 14 days, 15 days, 16 days, 17 days, 18 days, 19 days, 20 days, 21 days, 22 days, 23 days, 24 days, 25 days, 26 days, 27 days, 28 days, 29 days, 30 days, 1 week, 2 weeks, three weeks, 4 weeks, 1 month, 2 months, 3 months, 4 months, 5 months, 6 months, 7 months, 8 months, 9 months, 10 months, 11 months, 12 months, or any combination thereof, before the immunogenic vaccine is administered. For example, seliciclib, ribociclib, abemaciclib, or palbociclib can be administered at most 1 hour, 2 hours, 3 hours, 4 hours, 5 hours, 6 hours, 7 hours, 8 hours, 9 hours, 10 hours, 11 hours, 12 hours, 1 day, 2 days, 3 days, 4 days, 5 days, 6 days, 7 days, 8 days, 9, days, 10 days, 11 days, 12 days, 13 days, 14 days, 15 days, 16 days, 17 days, 18 days, 19 days, 20 days, 21 days, 22 days, 23 days, 24 days, 25 days, 26 days, 27 days, 28 days, 29 days, 30 days, 1 week, 2 weeks, 3 weeks, 4 weeks, 1 month, 2 months, 3 months, 4 months, 5 months, 6 months, 7 months, 8 months, 9 months, 10 months, 11 months, 12 months, or any combination thereof, before the immunogenic vaccine is administered.

[0573] In some embodiments the cyclin dependent kinase inhibitor is administered about 1 hour, 2 hours, 3 hours, 4 hours, 5 hours, 6 hours, 7 hours, 8 hours, 9 hours, 10 hours, 11 hours, 12 hours, 1 day, 2 days, 3 days, 4 days, 5 days, 6 days, 7 days, 8 days, 9, days, 10 days, 11 days, 12 days, 13 days, 14 days, 15 days, 16 days, 17 days, 18 days, 19 days, 20 days, 21 days, 22 days, 23 days, 24 days, 25 days, 26 days, 27 days, 28 days, 29 days, 30 days, 1 week, 2 weeks, three weeks, 4 weeks, 1 month, 2 months, 3 months, 4 months, 5 months, 6 months, 7 months, 8 months, 9 months, 10 months, 11 months, 12 months, or any combination thereof, before the immunogenic vaccine is administered. For example, seliciclib, ribociclib, abemaciclib, or palbociclib can be administered about 1 hour, 2 hours, 3 hours, 4 hours, 5 hours, 6 hours, 7 hours, 8 hours, 9 hours, 10 hours, 11 hours, 12 hours, 1 day, 2 days, 3 days, 4 days, 5 days, 6 days, 7 days, 8 days, 9, days, 10 days, 11 days, 12 days, 13 days, 14 days, 15 days, 16 days, 17 days, 18 days, 19 days, 20 days, 21 days, 22 days, 23 days, 24 days, 25 days, 26 days, 27 days, 28 days, 29 days, 30 days, 1 week, 2 weeks, 3 weeks, 4 weeks, 1 month, 2 months, 3 months, 4 months, 5 months, 6 months, 7 months, 8 months, 9 months, 10 months, 11 months, 12 months, or any combination thereof, before the immunogenic vaccine is administered.

[0574] In some embodiments, provided herein is a method of treating a condition or disease comprising administering to a patient in need thereof a therapeutically effective amount of a immunogenic vaccine, in combination with a therapeutically effective amount of a cyclin dependent kinase inhibitor. For example, provided herein is a method of treating a condition or disease comprising administering to a patient in need thereof a therapeutically effective amount of a immunogenic vaccine, in combination with a therapeutically effective amount of seliciclib, ribociclib, abemaciclib, or palbociclib.

[0575] In some embodiments, a immunogenic vaccine is administered once, twice, or thrice daily for 2, 3, 4, 5, 6, 7, 8, 9, 10, 11, 12, 13, 14, 15, 16, 17, 18, 19, 20, 21, 22, 23, 24, 25, 26, 27, 28, 29, or 30, consecutive days followed by 1, 2, 3, 4, 5, 6, 7, 8, 9, 10, 11, 12, 13, 14, 15, 16, 17, 18, 19, 20, 21, 22, 23, 24, 25, 26, 27, 28, 29, or 30 days of rest (e.g., no administration of the immunogenic vaccine/discontinuation of treatment) in a 1, 2, 3, 4, 5, 6, 7, 8, 9, 10, 11, 12, 13, 14, 15, 16, 17, 18, 19, 20, 21, 22, 23, 24, 25, 26, 27, or 28 day cycle; and the cyclin dependent kinase inhibitor (e.g., seliciclib, ribociclib, abemaciclib, or palbociclib) is administered prior to, concomitantly with, or subsequent to administration of the immunogenic vaccine on one or more days (e.g., on day 1 of cycle 1). In some embodiments, the combination therapy is administered for 1, 2, 3, 4, 5, 6, 7, 8, 9, 10, 12, or 13 cycles of 1, 2, 3, 4, 5, 6, 7, 8, 9, 10, 11, 12, 13, 14, 15, 16, 17, 18, 19, 20, 21, 22, 23, 24, 25, 26, 27, or 28 days. In some embodiments, the combination therapy is administered for 1 to 12 or 13 cycles of 28 days (e.g., about 12 months).

[0576] In some embodiments, provided herein is a method of treating a condition or disease comprising administering to a patient in need thereof a therapeutically effective amount of a immunogenic vaccine in combination with a therapeutically effective amount of a cyclin dependent kinase inhibitor, e.g., seliciclib, ribociclib, abemaciclib, or palbociclib, and a secondary active agent, such as a checkpoint inhibitor. In some embodiments, a immunogenic vaccine is administered once, twice, or thrice daily for 2, 3, 4, 5, 6, 7, 8, 9, 10, 11, 12, 13, 14, 15, 16, 17, 18, 19, 20, 21, 22, 23, 24, 25, 26, 27, 28, 29, or 30, consecutive days followed by 1, 2, 3, 4, 5, 6, 7, 8, 9, 10, 11, 12, 13, 14, 15, 16, 17, 18, 19, 20, 21, 22, 23, 24, 25, 26, 27, 28, 29, or 30 days of rest (e.g., no administration of the immunogenic vaccine/discontinuation of treatment) in a 1, 2, 3, 4, 5, 6, 7, 8, 9, 10, 11, 12, 13, 14, 15, 16, 17, 18, 19, 20, 21, 22, 23, 24, 25, 26, 27, or 28 day cycle; the cyclin dependent kinase inhibitor (e.g., seliciclib, ribociclib, abemaciclib, or palbociclib) is administered prior to, concomitantly with, or subsequent to administration of the immunogenic vaccine on one or more days (e.g., on day 1 of cycle 1), and the secondary agent is administered daily, weekly, or monthly. In some embodiments, the combination therapy is administered for 1, 2, 3, 4, 5, 6, 7, 8, 9, 10, 12, or 13 cycles of 1, 2, 3, 4, 5, 6, 7, 8, 9, 10, 11, 12, 13, 14, 15, 16, 17, 18, 19, 20, 21, 22, 23, 24, 25, 26, 27, or 28 days. In some embodiments, the combination therapy is administered for 1 to 12 or 13 cycles of 28 days (e.g., about 12 months).

[0577] In certain embodiments, an additional therapeutic agent comprises a second immunotherapeutic agent. In some embodiments, the additional immunotherapeutic agent includes, but is not limited to, a colony stimulating factor, an interleukin, an antibody that blocks immunosuppressive functions (e.g., an anti-CTLA-4 antibody, anti-CD28 antibody, anti-CD3 antibody, anti-PD-1 antibody, anti-PD-L1 antibody, anti-TIGIT antibody), an antibody that enhances immune cell functions (e.g., an anti-GITR antibody, an anti-OX-40 antibody, an anti-CD40 antibody, or an anti-4-1BB antibody), a toll-like receptor (e.g., TLR4, TLR7, TLR9), a soluble ligand (e.g., GITRL, GITRL-Fc, OX-40L, OX-40L-Fc, CD40L, CD40L-Fc, 4-1BB ligand, or 4-1BB ligand-Fc), or a member of the B7 family (e.g., CD80, CD86). In some embodiments, the additional immunotherapeutic agent targets CTLA-4, CD28, CD3, PD-1, PD-L1, TIGIT, GITR, OX-40, CD-40, or 4-1BB.

[0578] In some embodiments, the additional therapeutic agent is an immune checkpoint inhibitor. In some embodiments, the immune checkpoint inhibitor is an anti-PD-1 antibody, an anti-PD-L1 antibody, an anti-CTLA-4 antibody, an anti-CD28 antibody, an anti-TIGIT antibody, an anti-LAG3 antibody, an anti-TIM3 antibody, an anti-GITR antibody, an anti-4-1BB antibody, or an anti-OX-40 antibody. In some embodiments, the additional therapeutic agent is an anti-TIGIT antibody. In some embodiments, the additional therapeutic agent is an anti-PD-1 antibody selected from the group consisting of: nivolumab (OPDIVO), pembrolizumab (KEYTRUDA), pidilzumab, MEDI0680, REGN2810, BGB-A317, and PDR001. In some embodiments, the additional therapeutic agent is an anti-PD-L1 antibody selected from the group consisting of: BMS935559 (MDX-1105), atexolizumab (MPDL3280A), durvalumab (MED14736), and avelumab (MSB0010718C). In some embodiments, the additional therapeutic agent is an anti-CTLA-4 antibody selected from the group consisting of: ipilimumab (YERVOY) and tremelimumab. In some embodiments, the additional therapeutic agent is an anti-LAG-3 antibody selected from the group consisting of: BMS-986016 and LAG525. In some embodiments, the additional therapeutic agent is an anti-OX-40 antibody selected from the group consisting of: MEDI6469, MEDI0562, and MOXR0916. In some embodiments, the additional therapeutic agent is an anti-4-1BB antibody selected from the group consisting of: PF-05082566.

[0579] In some embodiments, the neoantigen therapeutic can be administered in combination with a biologic molecule selected from the group consisting of: adrenomedullin (AM), angiopoietin (Ang), BMPs, BDNF, EGF, erythropoietin (EPO), FGF, GDNF, granulocyte colony stimulating factor (G-CSF), granulocyte-macrophage colony stimulating factor (GM-CSF), macrophage colony stimulating factor (M-CSF), stem cell factor (SCF), GDF9, HGF, HDGF, IGF, migration-stimulating factor, myostatin (GDF-8), NGF, neurotrophins, PDGF, thrombopoietin, TGF-α, TGF-β, TNF-α, VEGF, P1GF, gamma-IFN, IL-1, IL-2, IL-3, IL-4, IL-5, IL-6, IL-7, IL-12, IL-15, and IL-18.

[0580] In some embodiments, treatment with a neoantigen therapeutic described herein can be accompanied by surgical removal of tumors, removal of cancer cells, or any other surgical therapy deemed necessary by a treating physician.

[0581] In certain embodiments, treatment involves the administration of a neoantigen therapeutic described herein in combination with radiation therapy. Treatment with an agent can occur prior to, concurrently with, or subsequent to administration of radiation therapy. Dosing schedules for such radiation therapy can be determined by the skilled medical practitioner.

[0582] Combined administration can include co-administration, either in a single pharmaceutical formulation or using separate formulations, or consecutive administration in either order but generally within a time period such that all active agents can exert their biological activities simultaneously.

[0583] It will be appreciated that the combination of a neoantigen therapeutic described herein and at least one additional therapeutic agent can be administered in any order or concurrently. In some embodiments, the agent will be administered to patients that have previously undergone treatment with a second therapeutic agent. In certain other embodiments, the neoantigen therapeutic and a second therapeutic agent will be administered substantially simultaneously or concurrently. For example, a subject can be given an agent while undergoing a course of treatment with a second therapeutic agent (e.g., chemotherapy). In certain embodiments, a neoantigen therapeutic will be administered within 1 year of the treatment with a second therapeutic agent. It will further be appreciated that the two (or more) agents or treatments can be administered to the subject within a matter of hours or minutes (i.e., substantially simultaneously).

[0584] For the treatment of a disease, the appropriate dosage of a neoantigen therapeutic described herein depends on the type of disease to be treated, the severity and course of the disease, the responsiveness of the disease, whether the agent is administered for therapeutic or preventative purposes, previous therapy, the patient's clinical history, and so on, all at the discretion of the treating physician. The neoantigen therapeutic can be administered one time or over a series of treatments lasting from several days to several months, or until a cure is effected or a diminution of the disease state is achieved (e.g., reduction in tumor size). Optimal dosing schedules can be calculated from measurements of drug accumulation in the body of the patient and will vary depending on the relative potency of an individual agent. The administering physician can determine optimum dosages, dosing methodologies, and repetition rates.

[0585] In some embodiments, a neoantigen therapeutic can be administered at an initial higher “loading” dose, followed by one or more lower doses. In some embodiments, the frequency of administration can also change. In some embodiments, a dosing regimen can comprise administering an initial dose, followed by additional doses (or “maintenance” doses) once a week, once every two weeks, once every three weeks, or once every month. For example, a dosing regimen can comprise administering an initial loading dose, followed by a weekly maintenance dose of, for example, one-half of the initial dose. Or a dosing regimen can comprise administering an initial loading dose, followed by maintenance doses of, for example one-half of the initial dose every other week. Or a dosing regimen can comprise administering three initial doses for 3 weeks, followed by maintenance doses of, for example, the same amount every other week.

[0586] As is known to those of skill in the art, administration of any therapeutic agent can lead to side effects and/or toxicities. In some cases, the side effects and/or toxicities are so severe as to preclude administration of the particular agent at a therapeutically effective dose. In some cases, therapy must be discontinued, and other agents can be tried. However, many agents in the same therapeutic class display similar side effects and/or toxicities, meaning that the patient either has to stop therapy, or if possible, suffer from the unpleasant side effects associated with the therapeutic agent.

[0587] In some embodiments, the dosing schedule can be limited to a specific number of administrations or “cycles”. In some embodiments, the agent is administered for 3, 4, 5, 6, 7, 8, or more cycles. For example, the agent is administered every 2 weeks for 6 cycles, the agent is administered every 3 weeks for 6 cycles, the agent is administered every 2 weeks for 4 cycles, the agent is administered every 3 weeks for 4 cycles, etc. Dosing schedules can be decided upon and subsequently modified by those skilled in the art.

[0588] The present disclosure provides methods of administering to a subject a neoantigen therapeutic described herein comprising using an intermittent dosing strategy for administering one or more agents, which can reduce side effects and/or toxicities associated with administration of an agent, chemotherapeutic agent, etc. In some embodiments, a method for treating cancer in a human subject comprises administering to the subject a therapeutically effective dose of a neoantigen therapeutic in combination with a therapeutically effective dose of a chemotherapeutic agent, wherein one or both of the agents are administered according to an intermittent dosing strategy. In some embodiments, a method for treating cancer in a human subject comprises administering to the subject a therapeutically effective dose of a neoantigen therapeutic in combination with a therapeutically effective dose of a second immunotherapeutic agent, wherein one or both of the agents are administered according to an intermittent dosing strategy. In some embodiments, the intermittent dosing strategy comprises administering an initial dose of a neoantigen therapeutic to the subject, and administering subsequent doses of the agent about once every 2 weeks. In some embodiments, the intermittent dosing strategy comprises administering an initial dose of a neoantigen therapeutic to the subject, and administering subsequent doses of the agent about once every 3 weeks. In some embodiments, the intermittent dosing strategy comprises administering an initial dose of a neoantigen therapeutic to the subject, and administering subsequent doses of the agent about once every 4 weeks. In some embodiments, the agent is administered using an intermittent dosing strategy and the additional therapeutic agent is administered weekly.

[0589] The present disclosure provides compositions comprising the neoantigen therapeutic described herein. The present disclosure also provides pharmaceutical compositions comprising a neoantigen therapeutic described herein and a pharmaceutically acceptable vehicle. In some embodiments, the pharmaceutical compositions find use in immunotherapy. In some embodiments, the compositions find use in inhibiting tumor growth. In some embodiments, the pharmaceutical compositions find use in inhibiting tumor growth in a subject (e.g., a human patient). In some embodiments, the compositions find use in treating cancer. In some embodiments, the pharmaceutical compositions find use in treating cancer in a subject (e.g., a human patient).

[0590] Formulations are prepared for storage and use by combining a neoantigen therapeutic of the present disclosure with a pharmaceutically acceptable vehicle (e.g., a carrier or excipient). Those of skill in the art generally consider pharmaceutically acceptable carriers, excipients, and/or stabilizers to be inactive ingredients of a formulation or pharmaceutical composition. Exemplary formulations are listed in WO 2015/095811.

[0591] Suitable pharmaceutically acceptable vehicles include, but are not limited to, nontoxic buffers such as phosphate, citrate, and other organic acids; salts such as sodium chloride; antioxidants including ascorbic acid and methionine; preservatives such as octadecyldimethylbenzyl ammonium chloride, hexamethonium chloride, benzalkonium chloride, benzethonium chloride, phenol, butyl or benzyl alcohol, alkyl parabens, such as methyl or propyl paraben, catechol, resorcinol, cyclohexanol, 3-pentanol, and m-cresol; low molecular weight polypeptides (e.g., less than about 10 amino acid residues); proteins such as serum albumin, gelatin, or immunoglobulins; hydrophilic polymers such as polyvinylpyrrolidone; amino acids such as glycine, glutamine, asparagine, histidine, arginine, or lysine; carbohydrates such as monosaccharides, disaccharides, glucose, mannose, or dextrins; chelating agents such as EDTA; sugars such as sucrose, mannitol, trehalose or sorbitol; salt-forming counter-ions such as sodium; metal complexes such as Zn-protein complexes; and non-ionic surfactants such as TWEEN or polyethylene glycol (PEG). (Remington: The Science and Practice of Pharmacy, 22st Edition, 2012, Pharmaceutical Press, London). In some embodiments, the vehicle is 5% dextrose in water.

[0592] The pharmaceutical compositions described herein can be administered in any number of ways for either local or systemic treatment. Administration can be topical by epidermal or transdermal patches, ointments, lotions, creams, gels, drops, suppositories, sprays, liquids and powders; pulmonary by inhalation or insufflation of powders or aerosols, including by nebulizer, intratracheal, and intranasal; oral; or parenteral including intravenous, intra-arterial, intratumoral, subcutaneous, intraperitoneal, intramuscular (e.g., injection or infusion), or intracranial (e.g., intrathecal or intraventricular).

[0593] The therapeutic formulation can be in unit dosage form. Such formulations include tablets, pills, capsules, powders, granules, solutions or suspensions in water or non-aqueous media, or suppositories.

[0594] The neoantigenic peptides described herein can also be entrapped in microcapsules. Such microcapsules are prepared, for example, by coacervation techniques or by interfacial polymerization, for example, hydroxymethylcellulose or gelatin-microcapsules and poly-(methylmethacylate) microcapsules, respectively, in colloidal drug delivery systems (for example, liposomes, albumin microspheres, microemulsions, nanoparticles and nanocapsules) or in macroemulsions as described in Remington: The Science and Practice of Pharmacy, 22st Edition, 2012, Pharmaceutical Press, London.

[0595] In certain embodiments, pharmaceutical formulations include a neoantigen therapeutic described herein complexed with liposomes. Methods to produce liposomes are known to those of skill in the art. For example, some liposomes can be generated by reverse phase evaporation with a lipid composition comprising phosphatidylcholine, cholesterol, and PEG-derivatized phosphatidylethanolamine (PEG-PE). Liposomes can be extruded through filters of defined pore size to yield liposomes with the desired diameter.

[0596] In certain embodiments, sustained-release preparations comprising the neoantigenic peptides described herein can be produced. Suitable examples of sustained-release preparations include semi-permeable matrices of solid hydrophobic polymers containing an agent, where the matrices are in the form of shaped articles (e.g., films or microcapsules). Examples of sustained-release matrices include polyesters, hydrogels such as poly(2-hydroxyethyl-methacrylate) or poly(vinyl alcohol), polylactides, copolymers of L-glutamic acid and 7 ethyl-L-glutamate, non-degradable ethylene-vinyl acetate, degradable lactic acid-glycolic acid copolymers such as the LUPRON DEPOT™ (injectable microspheres composed of lactic acid-glycolic acid copolymer and leuprolide acetate), sucrose acetate isobutyrate, and poly-D-(−)-3-hydroxybutyric acid.

[0597] The present disclosure provides methods of treatment comprising an immunogenic vaccine. Methods of treatment for a disease (such as cancer or a viral infection) are provided. A method can comprise administering to a subject an effective amount of a composition comprising an immunogenic antigen. In some embodiments, the antigen comprises a viral antigen. In some embodiments, the antigen comprises a tumor antigen.

[0598] Non-limiting examples of vaccines that can be prepared include a peptide-based vaccine, a nucleic acid-based vaccine, an antibody based vaccine, a T cell based vaccine, and an antigen-presenting cell based vaccine.

[0599] Vaccine compositions can be formulated using one or more physiologically acceptable carriers including excipients and auxiliaries which facilitate processing of the active agents into preparations which can be used pharmaceutically. Proper formulation can be dependent upon the route of administration chosen. Any of the well-known techniques, carriers, and excipients can be used as suitable and as understood in the art.

[0600] In some cases, the vaccine composition is formulated as a peptide-based vaccine, a nucleic acid-based vaccine, an antibody based vaccine, or a cell based vaccine. For example, a vaccine composition can include naked cDNA in cationic lipid formulations; lipopeptides (e.g., Vitiello, A. et al., J. Clin. Invest. 95:341, 1995), naked cDNA or peptides, encapsulated e.g., in poly(DL-lactide-co-glycolide) (“PLG”) microspheres (see, e.g., Eldridge, et al., Molec. Immunol. 28:287-294, 1991: Alonso et al, Vaccine 12:299-306, 1994; Jones et al, Vaccine 13:675-681, 1995); peptide composition contained in immune stimulating complexes (ISCOMS) (e.g., Takahashi et al, Nature 344:873-875, 1990; Hu et al, Clin. Exp. Immunol. 113:235-243, 1998); or multiple antigen peptide systems (MAPs) (see e.g., Tam, J. P., Proc. Natl Acad. Sci. U.S.A. 85:5409-5413, 1988; Tam, J. P., J. Immunol. Methods 196:17-32, 1996). Sometimes, a vaccine is formulated as a peptide-based vaccine, or nucleic acid based vaccine in which the nucleic acid encodes the polypeptides. Sometimes, a vaccine is formulated as an antibody based vaccine. Sometimes, a vaccine is formulated as a cell based vaccine.

[0601] The amino acid sequence of an identified disease-specific immunogenic neoantigen peptide can be used develop a pharmaceutically acceptable composition. The source of antigen can be, but is not limited to, natural or synthetic proteins, including glycoproteins, peptides, and superantigens; antibody/antigen complexes; lipoproteins; RNA or a translation product thereof, and DNA or a polypeptide encoded by the DNA. The source of antigen may also comprise non-transformed, transformed, transfected, or transduced cells or cell lines. Cells may be transformed, transfected, or transduced using any of a variety of expression or retroviral vectors known to those of ordinary skill in the art that may be employed to express recombinant antigens. Expression may also be achieved in any appropriate host cell that has been transformed, transfected, or transduced with an expression or retroviral vector containing a DNA molecule encoding recombinant antigen(s). Any number of transfection, transformation, and transduction protocols known to those in the art may be used. Recombinant vaccinia vectors and cells infected with the vaccinia vector, may be used as a source of antigen.

[0602] A composition can comprise a synthetic disease-specific immunogenic neoantigen peptide. A composition can comprise two or more disease-specific immunogenic neoantigen peptides. A composition may comprise a precursor to a disease-specific immunogenic peptide (such as a protein, peptide, DNA and RNA). A precursor to a disease-specific immunogenic peptide can generate or be generated to the identified disease-specific immunogenic neoantigen peptide. In some embodiments, a therapeutic composition comprises a precursor of an immunogenic peptide. The precursor to a disease-specific immunogenic peptide can be a pro-drug. In some embodiments, the composition comprising a disease-specific immunogenic neoantigen peptide may further comprise an adjuvant. For example, the neoantigen peptide can be utilized as a vaccine. In some embodiments, an immunogenic vaccine may comprise a pharmaceutically acceptable immunogenic neoantigen peptide. In some embodiments, an immunogenic vaccine may comprise a pharmaceutically acceptable precursor to an immunogenic neoantigen peptide (such as a protein, peptide, DNA and RNA). In some embodiments, a method of treatment comprises administering to a subject an effective amount of an antibody specifically recognizing an immunogenic neoantigen peptide. In some embodiments, a method of treatment comprises administering to a subject an effective amount of a soluble TCR or TCR analog specifically recognizing an immunogenic neoantigen peptide.

[0603] The methods described herein are particularly useful in the personalized medicine context, where immunogenic neoantigen peptides are used to develop therapeutics (such as vaccines or therapeutic antibodies) for the same individual. Thus, a method of treating a disease in a subject can comprise identifying an immunogenic neoantigen peptide in a subject according to the methods described herein; and synthesizing the peptide (or a precursor thereof); and administering the peptide or an antibody specifically recognizing the peptide to the subject. In some embodiments, an expression pattern of an immunogenic neoantigen can serve as the essential basis for the generation of patient specific vaccines. In some embodiments, an expression pattern of an immunogenic neoantigen can serve as the essential basis for the generation of a vaccine for a group of patients with a particular disease. Thus, particular diseases, e.g., particular types of tumors, can be selectively treated in a patient group.

[0604] In some embodiments, the peptides described herein are structurally normal antigens that can be recognized by autologous anti-disease T cells in a large patient group. In some embodiments, an antigen-expression pattern of a group of diseased subjects whose disease expresses structurally normal neoantigens is determined.

[0605] In some embodiments, the peptides described herein comprises a first peptide comprising a first neoepitope of a protein and a second peptide comprising a second neoepitope of the same protein, wherein the first peptide is different from the second peptide, and wherein the first neoepitope comprises a mutation and the second neoepitope comprises the same mutation. In some embodiments, the peptides described herein comprises a first peptide comprising a first neoepitope of a first region of a protein and a second peptide comprising a second neoepitope of a second region of the same protein, wherein the first region comprises at least one amino acid of the second region, wherein the first peptide is different from the second peptide and wherein the first neoepitope comprises a first mutation and the second neoepitope comprises a second mutation. In some embodiments, the first mutation and the second mutation are the same. In some embodiments, the mutation is selected from the group consisting of a point mutation, a splice-site mutation, a frameshift mutation, a read-through mutation, a gene fusion mutation and any combination thereof.

[0606] There are a variety of ways in which to produce immunogenic neoantigens. Proteins or peptides may be made by any technique known to those of skill in the art, including the expression of proteins, polypeptides or peptides through standard molecular biological techniques, the isolation of proteins or peptides from natural sources, in vitro translation, or the chemical synthesis of proteins or peptides. In general, such disease specific neoantigens may be produced either in vitro or in vivo. Immunogenic neoantigens may be produced in vitro as peptides or polypeptides, which may then be formulated into a personalized vaccine or immunogenic composition and administered to a subject. In vitro production of immunogenic neoantigens can comprise peptide synthesis or expression of a peptide/polypeptide from a DNA or RNA molecule in any of a variety of bacterial, eukaryotic, or viral recombinant expression systems, followed by purification of the expressed peptide/polypeptide. Alternatively, immunogenic neoantigens can be produced in vivo by introducing molecules (e.g., DNA, RNA, and viral expression systems) that encode an immunogenic neoantigen into a subject, whereupon the encoded immunogenic neoantigens are expressed. In some embodiments, a polynucleotide encoding an immunogenic neoantigen peptide can be used to produce the neoantigen peptide in vitro.

[0607] In some embodiments, a polynucleotide comprises a sequence with at least 60%, 61%, 62%, 63%, 64%, 65%, 66%, 67%, 68%, 69%, 70%, 71%, 72%, 73%, 74%, 75%, 76%, 77%, 78%, 79%, 80%, 81%, 82%, 83%, 84%, 85%, 86%, 87%, 88%, 89%, 90%, 91%, 92%, 93%, 94%, 95%, 96%, 97%, 98%, 99% or 100% sequence identity to a polynucleotide encoding an immunogenic neoantigen.

[0608] The polynucleotide may be, e.g., DNA, cDNA, PNA, CNA, RNA, single- and/or double-stranded, native or stabilized forms of polynucleotides, or combinations thereof. A nucleic acid sequence encoding an immunogenic neoantigen peptide may or may not contain introns so long as the nucliec acid sequence codes for the peptide. In some embodiments in vitro translation is used to produce the peptide.

[0609] Expression vectors comprising sequences encoding the neoantigen, as well as host cells containing the expression vectors, are also contemplated. Expression vectors suitable for use in the present disclosure can comprise at least one expression control element operationally linked to the nucleic acid sequence. The expression control elements are inserted in the vector to control and regulate the expression of the nucleic acid sequence. Examples of expression control elements are well known in the art and include, for example, the lac system, operator and promoter regions of phage lambda, yeast promoters and promoters derived from polyoma, adenovirus, retrovirus or SV40. Additional operational elements include, but are not limited to, leader sequences, termination codons, polyadenylation signals and any other sequences necessary or preferred for the appropriate transcription and subsequent translation of the nucleic acid sequence in the host system. It will be understood by one skilled in the art the correct combination of expression control elements will depend on the host system chosen. It will further be understood that the expression vector should contain additional elements necessary for the transfer and subsequent replication of the expression vector containing the nucleic acid sequence in the host system. Examples of such elements include, but are not limited to, origins of replication and selectable markers.

[0610] The neoantigen peptides may be provided in the form of RNA or cDNA molecules encoding the desired neoantigen peptides. One or more neoantigen peptides of the present disclosure may be encoded by a single expression vector. Generally, the DNA is inserted into an expression vector, such as a plasmid, in proper orientation and correct reading frame for expression, if necessary, the DNA may be linked to the appropriate transcriptional and translational regulatory control nucleotide sequences recognized by the desired host (e.g., bacteria), although such controls are generally available in the expression vector. The vector is then introduced into the host bacteria for cloning using standard techniques. Useful expression vectors for eukaryotic hosts, especially mammals or humans include, for example, vectors comprising expression control sequences from SV40, bovine papilloma virus, adenovirus and cytomegalovirus. Useful expression vectors for bacterial hosts include known bacterial plasmids, such as plasmids from E. coli, including pCR 1, pBR322, pMB9 and their derivatives, wider host range plasmids, such as M13 and filamentous single-stranded DNA phages.

[0611] In embodiments, a DNA sequence encoding a polypeptide of interest can be constructed by chemical synthesis using an oligonucleotide synthesizer. Such oligonucleotides can be designed based on the amino acid sequence of the desired polypeptide and selecting those codons that are favored in the host cell in which the recombinant polypeptide of interest is produced. Standard methods can be applied to synthesize an isolated polynucleotide sequence encoding an isolated polypeptide of interest.

[0612] Suitable host cells for expression of a polypeptide include prokaryotes, yeast, insect or higher eukaryotic cells under the control of appropriate promoters. Prokaryotes include gram negative or gram positive organisms, for example E. coli or bacilli. Higher eukaryotic cells include established cell lines of mammalian origin. Cell-free translation systems can also be employed. Appropriate cloning and expression vectors for use with bacterial, fungal, yeast, and mammalian cellular hosts are well known in the art. Various mammalian or insect cell culture systems can be employed to express recombinant protein. Exemplary mammalian host cell lines include, but are not limited to COS-7, L cells, C127, 3T3, Chinese hamster ovary (CHO), 293, HeLa and BHK cell lines. Mammalian expression vectors can comprise nontranscribed elements such as an origin of replication, a suitable promoter and enhancer linked to the gene to be expressed, and other 5′ or 3′ flanking nontranscribed sequences, and 5′ or 3′ nontranslated sequences, such as necessary ribosome binding sites, a polyadenylation site, splice donor and acceptor sites, and transcriptional termination sequences.

[0613] The proteins produced by a transformed host can be purified according to any suitable method. Such standard methods include chromatography (e.g., ion exchange, affinity and sizing column chromatography, and the like), centrifugation, differential solubility, or by any other standard technique for protein purification. Affinity tags such as hexahistidine, maltose binding domain, influenza coat sequence, glutathione-S-transferase, and the like can be attached to the protein to allow easy purification by passage over an appropriate affinity column. Isolated proteins can also be physically characterized using such techniques as proteolysis, nuclear magnetic resonance and x-ray crystallography.

[0614] A vaccine can comprise an entity that binds a polypeptide sequence described herein. The entity can be an antibody. Antibody-based vaccine can be formulated using any of the well-known techniques, carriers, and excipients as suitable and as understood in the art. In some embodiments, the peptides described herein can be used for making neoantigen specific therapeutics such as antibody therapeutics. For example, neoantigens can be used to raise and/or identify antibodies specifically recognizing the neoantigens. These antibodies can be used as therapeutics. The antibody can be a natural antibody, a chimeric antibody, a humanized antibody, or can be an antibody fragment. The antibody may recognize one or more of the polypeptides described herein. In some embodiments, the antibody can recognize a polypeptide that has a sequence with at most 40%, 50%, 60%, 61%, 62%, 63%, 64%, 65%, 66%, 67%, 68%, 69%, 70%, 71%, 72%, 73%, 74%, 75%, 76%, 77%, 78%, 79%, 80%, 81%, 82%, 83%, 84%, 85%, 86%, 87%, 88%, 89%, 90%, 91%, 92%, 93%, 94%, 95%, 96%, 97%, 98%, or 99% sequence identity to a polypeptide described herein. In some embodiments, the antibody can recognize a polypeptide that has a sequence with at least 40%, 50%, 60%, 61%, 62%, 63%, 64%, 65%, 66%, 67%, 68%, 69%, 70%, 71%, 72%, 73%, 74%, 75%, 76%, 77%, 78%, 79%, 80%, 81%, 82%, 83%, 84%, 85%, 86%, 87%, 88%, 89%, 90%, 91%, 92%, 93%, 94%, 95%, 96%, 97%, 98%, 99%, or 100% sequence identity to a polypeptide described herein. In some embodiments, the antibody can recognize a polypeptide sequence that is at least 30%, 40%, 50%, 60%, 61%, 62%, 63%, 64%, 65%, 66%, 67%, 68%, 69%, 70%, 71%, 72%, 73%, 74%, 75%, 76%, 77%, 78%, 79%, 80%, 81%, 82%, 83%, 84%, 85%, 86%, 87%, 88%, 89%, 90%, 91%, 92%, 93%, 94%, 95%, 96%, 97%, 98%, 99%, or 100% of a length of a polypeptide described herein. In some embodiments, the antibody can recognize a polypeptide sequence that is at most 30%, 40%, 50%, 60%, 61%, 62%, 63%, 64%, 65%, 66%, 67%, 68%, 69%, 70%, 71%, 72%, 73%, 74%, 75%, 76%, 77%, 78%, 79%, 80%, 81%, 82%, 83%, 84%, 85%, 86%, 87%, 88%, 89%, 90%, 91%, 92%, 93%, 94%, 95%, 96%, 97%, 98%, 99%, or 100% of a length of a polypeptide described herein.

[0615] The present disclosure also contemplates the use of nucleic acid molecules as vehicles for delivering neoantigen peptides/polypeptides to the subject in need thereof, in vivo, in the form of, e.g., DNA/RNA vaccines.

[0616] In some embodiments, the vaccine is a nucleic acid vaccine. In some embodiments, neoantigens can be administered to a subject by use of a plasmid. Plasmids may be introduced into animal tissues by a number of different methods, e.g., injection or aerosol instillation of naked DNA on mucosal surfaces, such as the nasal and lung mucosa. In some embodiments, physical delivery, such as with a “gene-gun” may be used. The exact choice of expression vectors can depend upon the peptide/polypeptides to be expressed, and is well within the skill of the ordinary artisan.

[0617] In some embodiments, the nucleic acid encodes an immunogenic peptide or peptide precursor. In some embodiments, the nucleic acid vaccine comprises sequences flanking the sequence coding the immunogenic peptide or peptide precursor. In some embodiments, the nucleic acid vaccine comprises more than one immunogenic epitope. In some embodiments, the nucleic acid vaccine is a DNA-based vaccine. In some embodiments, the nucleic acid vaccine is a RNA-based vaccine. In some embodiments, the RNA-based vaccine comprises mRNA. In some embodiments, the RNA-based vaccine comprises naked mRNA. In some embodiments, the RNA-based vaccine comprises modified mRNA (e.g., mRNA protected from degradation using protamine. mRNA containing modified 5′ CAP structure or mRNA containing modified nucleotides). In some embodiments, the RNA-based vaccine comprises single-stranded mRNA.

[0618] The polynucleotide may be substantially pure, or contained in a suitable vector or delivery system. Suitable vectors and delivery systems include viral, such as systems based on adenovirus, vaccinia virus, retroviruses, herpes virus, adeno-associated virus or hybrids containing elements of more than one virus. Non-viral delivery systems include cationic lipids and cationic polymers (e.g., cationic liposomes).

[0619] One or more neoantigen peptides can be encoded and expressed in vivo using a viral based system. Viral vectors may be used as recombinant vectors in the present disclosure, wherein a portion of the viral genome is deleted to introduce new genes without destroying infectivity of the virus. The viral vector of the present disclosure is a nonpathogenic virus. In some embodiments the viral vector has a tropism for a specific cell type in the mammal. In another embodiment, the viral vector of the present disclosure is able to infect professional antigen presenting cells such as dendritic cells and macrophages. In yet another embodiment of the present disclosure, the viral vector is able to infect any cell in the mammal. The viral vector may also infect tumor cells. Viral vectors used in the present disclosure include but is not limited to Poxvirus such as vaccinia virus, avipox virus, fowlpox virus and a highly attenuated vaccinia virus (Ankara or MVA), retrovirus, adenovirus, baculovirus and the like.

[0620] A vaccine can be delivered via a variety of routes. Delivery routes can include oral (including buccal and sub-lingual), rectal, nasal, topical, transdermal patch, pulmonary, vaginal, suppository, or parenteral (including intramuscular, intra-arterial, intrathecal, intradermal, intraperitoneal, subcutaneous and intravenous) administration or in a form suitable for administration by aerosolization, inhalation or insufflation. General information on drug delivery systems can be found in Ansel et al., Pharmaceutical Dosage Forms and Drug Delivery Systems (Lippencott Williams & Wilkins, Baltimore Md. (1999). The vaccine described herein can be administered to muscle, or can be administered via intradermal or subcutaneous injections, or transdermally, such as by iontophoresis. Epidermal administration of the vaccine can be employed.

[0621] In some instances, the vaccine can also be formulated for administration via the nasal passages. Formulations suitable for nasal administration, wherein the carrier is a solid, can include a coarse powder having a particle size, for example, in the range of about 10 to about 500 microns which is administered in the manner in which snuff is taken, i.e., by rapid inhalation through the nasal passage from a container of the powder held close up to the nose. The formulation can be a nasal spray, nasal drops, or by aerosol administration by nebulizer. The formulation can include aqueous or oily solutions of the vaccine.

[0622] The vaccine can be a liquid preparation such as a suspension, syrup or elixir. The vaccine can also be a preparation for parenteral, subcutaneous, intradermal, intramuscular or intravenous administration (e.g., injectable administration), such as a sterile suspension or emulsion.

[0623] The vaccine can include material for a single immunization, or may include material for multiple immunizations (i.e. a ‘multidose’ kit). The inclusion of a preservative is preferred in multidose arrangements. As an alternative (or in addition) to including a preservative in multidose compositions, the compositions can be contained in a container having an aseptic adaptor for removal of material.

[0624] The vaccine can be administered in a dosage volume of about 0.5 mL, although a half dose (i.e. about 0.25 mL) can be administered to children. Sometimes the vaccine can be administered in a higher dose e.g. about 1 ml.

[0625] The vaccine can be administered as a 1, 2, 3, 4, 5, 6, 7, 8, 9, 10, or more dose-course regimen. Sometimes, the vaccine is administered as a 1, 2, 3, or 4 dose-course regimen. Sometimes the vaccine is administered as a 1 dose-course regimen. Sometimes the vaccine is administered as a 2 dose-course regimen.

[0626] The administration of the first dose and second dose can be separated by about 0 day, 1 day, 2 days, 5 days, 7 days, 14 days, 21 days, 30 days, 2 months, 4 months, 6 months, 9 months, 1 year, 1.5 years, 2 years, 3 years, 4 years, or more.

[0627] The vaccine described herein can be administered every 1, 2, 3, 4, 5, 6, 7, 8, 9, 10, or more years. Sometimes, the vaccine described herein is administered every 2, 3, 4, 5, 6, 7, or more years. Sometimes, the vaccine described herein is administered every 4, 5, 6, 7, or more years. Sometimes, the vaccine described herein is administered once.

[0628] The dosage examples are not limiting and are only used to exemplify particular dosing regiments for administering a vaccine described herein. The effective amount for use in humans can be determined from animal models. For example, a dose for humans can be formulated to achieve circulating, liver, topical and/or gastrointestinal concentrations that have been found to be effective in animals. Based on animal data, and other types of similar data, those skilled in the art can determine the effective amounts of a vaccine composition appropriate for humans.

[0629] The effective amount when referring to an agent or combination of agents will generally mean the dose ranges, modes of administration, formulations, etc., that have been recommended or approved by any of the various regulatory or advisory organizations in the medical or pharmaceutical arts (e.g., FDA, AMA) or by the manufacturer or supplier.

[0630] In some aspects, the vaccine and kit described herein can be stored at between 2° C. and 8° C. In some instances, the vaccine is not stored frozen. In some instances, the vaccine is stored in temperatures of such as at −20° C. or −80° C. In some instances, the vaccine is stored away from sunlight.

### Kits

[0631] The neoantigen therapeutic described herein can be provided in kit form together with instructions for administration. Typically the kit would include the desired neoantigen therapeutic in a container, in unit dosage form and instructions for administration. Additional therapeutics, for example, cytokines, lymphokines, checkpoint inhibitors, antibodies, can also be included in the kit. Other kit components that can also be desirable include, for example, a sterile syringe, booster dosages, and other desired excipients.

[0632] Kits and articles of manufacture are also provided herein for use with one or more methods described herein. The kits can contain one or more neoantigenic polypeptides comprising one or more neoepitopes. The kits can also contain nucleic acids that encode one or more of the peptides or proteins described herein, antibodies that recognize one or more of the peptides described herein, or APC-based cells activated with one or more of the peptides described herein. The kits can further contain adjuvants, reagents, and buffers necessary for the makeup and delivery of the vaccines.

[0633] The kits can also include a carrier, package, or container that is compartmentalized to receive one or more containers such as vials, tubes, and the like, each of the container(s) comprising one of the separate elements, such as the peptides and adjuvants, to be used in a method described herein. Suitable containers include, for example, bottles, vials, syringes, and test tubes. The containers can be formed from a variety of materials such as glass or plastic.

[0634] The articles of manufacture provided herein contain packaging materials. Examples of pharmaceutical packaging materials include, but are not limited to, blister packs, bottles, tubes, bags, containers, bottles, and any packaging material suitable for a selected formulation and intended mode of administration and treatment. A kit typically includes labels listing contents and/or instructions for use, and package inserts with instructions for use. A set of instructions will also typically be included.

[0635] The present disclosure will be described in greater detail by way of specific examples. The following examples are offered for illustrative purposes, and are not intended to limit the present disclosure in any manner. Those of skill in the art will readily recognize a variety of non-critical parameters that can be changed or modified to yield alternative embodiments according to the present disclosure. All patents, patent applications, and printed publications listed herein are incorporated herein by reference in their entirety.

### EXAMPLES

[0636] These examples are provided for illustrative purposes only and not to limit the scope of the claims provided herein.

### Example 1—Induction of CD4⁺ and CD8⁺ T Cell Responses

[0637] In vitro T cell inductions are used to expand neo-antigen specific T cells. Mature professional APCs are prepared for these assays in the following way. Monocytes are enriched from healthy human donor PBMCs using a bead-based kit (Miltenyi). Enriched cells are plated in GM-CSF and IL-4 to induce immature DCs. After 5 days, immature DCs are incubated at 37° C. with pools of peptides for 1 hour before addition of a cytokine maturation cocktail (GM-CSF, IL-1β, IL-4, IL-6, TNFα, PGE1β). The pools of peptides can include multiple mutations, with both shortmers and longmers to expand CD8⁺ and CD4⁺ T cells, respectively. Cells are incubated at 37° C. to mature DCs.

[0638] After maturation of DCs, PBMCs (either bulk or enriched for T cells) are added to mature dendritic cells with proliferation cytokines. Cultures are monitored for peptide-specific T cells using a combination of functional assays and/or tetramer staining. Parallel immunogenicity assays with the modified and parent peptides allowed for comparisons of the relative efficiency with which the peptides expanded peptide-specific T cells.

### Example 2—Tetramer Staining Assay

[0639] MHC tetramers are purchased or manufactured on-site, and are used to measure peptide-specific T cell expansion in the immunogenicity assays. For the assessment, tetramer is added to 1×10⁵ cells in PBS containing 1% FCS and 0.1% sodium azide (FACS buffer) according to manufacturer's instructions. Cells are incubated in the dark for 20 minutes at room temperature. Antibodies specific for T cell markers, such as CD8, are then added to a final concentration suggested by the manufacturer, and the cells are incubated in the dark at 4° C. for 20 minutes. Cells are washed with cold FACS buffer and resuspended in buffer containing 1% formaldehyde. Cells are acquired on a FACS Calibur (Becton Dickinson) instrument, and are analyzed by use of Cellquest software (Becton Dickinson). For analysis of tetramer positive cells, the lymphocyte gate is taken from the forward and side-scatter plots. Data are reported as the percentage of cells that were CD8⁺/tetramer⁺.

### Example 3—Intracellular Cytokine Staining Assay

[0640] In the absence of well-established tetramer staining to identify antigen-specific T cell populations, antigen-specificity can be estimated using assessment of cytokine production using well-established flow cytometry assays. Briefly, T cells are stimulated with the peptide of interest and compared to a control. After stimulation, production of cytokines by CD4⁺ T cells (e.g., IFNγ and TNFα) are assessed by intracellular staining. These cytokines, especially IFNγ, can be used to identify stimulated cells. FIG. 11 depicts a FACS analysis of antigen-specific induction of IFNγ and TNFα levels of CD4⁺ cells from a healthy HLA-A02:01 donor stimulated with APCs loaded with or without a GATA3 neoORF peptide.

### Example 4—ELISPOT Assay

[0641] Peptide-specific T cells are functionally enumerated using the ELISPOT assay (BD Biosciences), which measures the release of IFNγ from T cells on a single cell basis. Target cells (T2 or HLA-A0201 transfected C1Rs) were pulsed with 10 μM peptide for 1 hour at 37° C., and washed three times. 1×10⁵ peptide-pulsed targets are co-cultured in the ELISPOT plate wells with varying concentrations of T cells (5×10² to 2×10³) taken from the immunogenicity culture. Plates are developed according to the manufacturer's protocol, and analyzed on an ELISPOT reader (Cellular Technology Ltd.) with accompanying software. Spots corresponding to the number of IFNγ-producing T cells are reported as the absolute number of spots per number of T cells plated. T cells expanded on modified peptides are tested not only for their ability to recognize targets pulsed with the modified peptide, but also for their ability to recognize targets pulsed with the parent peptide. FIG. 35 is a graph showing antigen-specific induction of IFNγ. The IFNγ levels of two samples mock transduced or transduced with a lentiviral expression vector encoding a GATA3 neoORF peptide are shown.

### Example 5—CD107 Staining Assay

[0642] CD107a and b are expressed on the cell surface of CD8⁺ T cells following activation with cognate peptide. The lytic granules of T cells have a lipid bilayer that contains lysosomal-associated membrane glycoproteins (“LAMPs”), which include the molecules CD107a and b. When cytotoxic T cells are activated through the T cell receptor, the membranes of these lytic granules mobilize and fuse with the plasma membrane of the T cell. The granule contents are released, and this leads to the death of the target cell. As the granule membrane fuses with the plasma membrane, C107a and b are exposed on the cell surface, and therefore are markers of degranulation. Because degranulation as measured by CD107a and b staining is reported on a single cell basis, the assay is used to functionally enumerate peptide-specific T cells. To perform the assay, peptide is added to HLA-A02:01-transfected cells CIR to a final concentration of 20 μM, the cells were incubated for 1 hour at 37° C., and washed three times. 1×10⁵ of the peptide-pulsed C1R cells were aliquoted into tubes, and antibodies specific for CD107a and b are added to a final concentration suggested by the manufacturer (Becton Dickinson). Antibodies are added prior to the addition of T cells in order to “capture” the CD107 molecules as they transiently appear on the surface during the course of the assay. 1×10⁵ T cells from the immunogenicity culture are added next, and the samples were incubated for 4 hours at 37° C. The T cells are further stained for additional cell surface molecules such as CD8 and acquired on a FACS Calibur instrument (Becton Dickinson). Data is analyzed using the accompanying Cellquest software, and results are reported as the percentage of CD8⁺/CD107a and b⁺ cells. FIG. 34 is a graph showing antigen-specific induction of the cytotoxic marker CD107a. The percent CD107a+ cells of total CD8+ cells of two samples mock transduced or transduced with a lentiviral expression vector encoding a GATA3 neoORF peptide are shown.

### Example 6—Cytotoxicity Assays

[0643] Cytotoxic activity is measured using method 1 or method 2. Method 1 entails a chromium release assay. Target T2 cells are labeled for 1 hour at 37° C. with Na⁵¹Cr and washed 5×10³ target T2 cells are then added to varying numbers of T cells from the immunogenicity culture. Chromium release is measured in supernatant harvested after 4 hours of incubation at 37° C. The percentage of specific lysis is calculated as:

Experimental release-spontaneous release/Total release-spontaneous release×100. Equation 10.

[0644] In method 2 cytotoxicity activity is measured with the detection of cleaved Caspase 3 in target cells by Flow cytometry. Target cancer cells are engineered to express the mutant peptide along with the proper MHC-I allele. Mock-transduced target cells (i.e. not expressing the mutant peptide) are used as a negative control. The cells are labeled with CFSE to distinguish them from the stimulated PBMCs used as effector cells. The target and effector cells are co-cultured for 6 hours before being harvested. Intracellular staining is performed to detect the cleaved form of Caspase 3 in the CFSE-positive target cancer cells. The percentage of specific lysis is calculated as:

Experimental cleavage of Caspase 3/spontaneous cleavage of Caspase 3(measured in the absence of mutant peptide expression)×100. Equation 11.

[0645] The method 2 cytotoxicity assay is provided in materials and methods section of Example 25 herein.

### Example 7—Enhanced CD8⁺ T Cell Responses In Vivo Using Longmers and Shortmers Sequentially

[0646] Vaccination with longmer peptides can induce both CD4⁺ and CD8⁺ T cell responses, depending on the processing and presentation of the peptides. Vaccination with minimal shortmer epitopes focuses on generating CD8⁺ T cell responses, but does not require peptide processing before antigen presentation. As such, any cell can present the epitope readily, not just professional antigen-presenting cells (APCs). This may lead to tolerance of T cells that come in contact with healthy cells presenting antigens as part of peripheral tolerance. To circumvent this, initial immunization with longmers allows priming of CD8⁺ T cells only by APCs that can process and present the peptides. Subsequent immunizations boosts the initial CD8⁺ T cell responses.

### In Vivo Immunogenicity Assays

[0647] Nineteen 8-12 week old female C57BL/6 mice (Taconic Biosciences) were randomly and prospectively assigned to treatment groups on arrival. Animals were acclimated for three (3) days prior to study commencement. Animals were maintained on LabDiet™ 5053 sterile rodent chow and sterile water provided ad libitum. Animals in Group 1 served as vaccination adjuvant-only controls and were administered polyinosinic:polycytidylic acid (polyL:C) alone at 100 μg in a volume of 0.1 mL administered via subcutaneous injection (s.c.) on day 0, 7, and 14. Animals in Group 2 were administered 50 μg each of six longmer peptides (described below) along with polyL:C at 100 μg s.c. in a volume of 0.1 mL on day 0, 7 and 14. Animals in Group 3 were administered 50 μg each of six longmer peptides (described below) along with polyL:C at 100 μg s.c. in a volume of 0.1 mL on day 0 and molar-matched equivalents of corresponding shortmer peptides (described below) along with polyL:C at 100 μg s.c. in a volume of 0.1 mL on day 7 and 14. Animals were weighed and monitored for general health daily. Animals were euthanized by CO2 overdose at study completion Day 21, if an animal lost >30% of its body weight compared to weight at Day 0; or if an animal was found moribund. At sacrifice, spleens were harvested and processed into single-cell suspensions using standard protocols. Briefly, spleens were mechanical degraded through a 70 μM filter, pelleted, and lysed with ACK lysis buffer (Sigma) before resuspension in cell culture media.

### Peptides

[0648] Six previously identified murine neoantigens were used based on their demonstrated ability to induce CD8⁺ T cell responses. For each neoantigen, shortmers (8-11 amino acids) corresponding to the minimal epitope have been defined. Longmers corresponding to 20-27 amino acids surrounding the mutation were used.

### ELISPOT

[0649] ELISPOT analysis (Mouse IFNγ ELISPOT Reasy-SET-Go; EBioscience) was performed according to the kit protocol. Briefly, one day prior to day of analysis, 96-well filter plates (0.45 μm pore size hydrophobic PVDF membrane; EMD Millipore) were activated (35% EtOH), washed (PBS) and coated with capture antibody (1:250; 4° C. O/N). On the day of analysis, wells were washed and blocked (media; 2 hours at 37° C.). Approximately 2×10⁵ cells in 100 μL was added to the wells along with 100 μL of 10 mM test peptide pool (shortmers), or PMA/ionomycin positive control antigen, or vehicle. Cells incubated with antigen overnight (16-18 hours) at 37° C. The next day, the cell suspension was discarded, and wells were washed once with PBS, and twice with deionized water. For all wash steps in the remainder of the assay, wells were allowed to soak for 3 minutes at each wash step. Wells were then washed three times with wash buffer (PBS+0.05% Tween-20), and detection antibody (1:250) was added to all wells. Plates were incubated for two hours at room temperature. The detection antibody solution was discarded, and wells were washed three times with wash buffer. Avidin-HRP (1:250) was added to all wells, and plates were incubated for one hour at room temperature. Conjugate solution was discarded, and wells washed three times with wash buffer, then once with PBS. Substrate (3-amino-9-ethyl-carbazole, 0.1 M Acetate buffer, H₂O₂) was added to all wells, and spot development monitored (approximately 10 minutes). Substrate reaction was stopped by washing wells with water, and plates were allowed to air-dry overnight. The plates were analyzed on an ELISPOT reader (Cellular Technology Ltd.) with accompanying software. Spots corresponding to the number of IFNγ-producing T cells are reported as the absolute number of spots per number of T cells plated.

### Example 8—Detection of GATA3 neoORF Peptides by Mass Spectrometry

[0650] 293T cells were transduced with a lentiviral vector encoding various regions of peptides encoded by the GATA3 neoORF. 50-700 million of the transduced cells expressing peptides encoded by the GATA3 neoORF sequence were cultured and peptides were eluted from HLA-peptide complexes using an acid wash. Eluted peptides were then analyzed by MS/MS. For 293T cells expressing an HLA-A02:01 protein, the peptides VLPEPHLAL, SMLTGPPARV and MLTGPPARV were detected by mass spectrometry (FIG. 5). For 293T cells expressing an HLA-B07:02 protein, the peptides KPKRDGYMF and KPKRDGYMFL were detected by mass spectrometry (FIG. 5). For 293T cells expressing an HLA-B08:01 protein, the peptide ESKIMFATL was detected by mass spectrometry (FIG. 5).

### Example 9—GATA3 neoORF Produces Strong Epitopes on Multiple Alleles

[0651] Multiple peptides containing the neoepitopes in Table 4 below were expressed or loaded onto antigen presenting cells (APCs). Mass spectrometry was then performed and the affinity of the neoepitopes for the indicated HLA alleles and stability of the neoepitopes with the HLA alleles was determined.

TABLE 4
lists exemplary GATA3 neoORF
produced epitopes on multiple alleles

| | | Common | Observed | Observed |
|---|---|---|---|---|
| | | (C) or | MHC | MHC |
| | Neo- | variable | affinity | stability |
| Allele | epitope | (V) region | (nM) | (hr) |
| A02.01 | AIQPVLWTT | V | 8 | 1.5 |
| | MLTGPPARV | C | 11 | 5.8 |
| | SMLTGPPARV | C | 14 | 21.7 |
| | VLPEPHLAL | V | 16 | 1.1 |
| | TLQRSSLWCL | C | 118 | 0.5 |
| | YMFLKAESKI | C | 141 | 0.6 |
| | ALQPLQPHA | V | 604 | 1.5 |
| A03:01 | KIMFATLQR | C | 3 | 5.6 |
| | VLWTTPPLQH | V | 16 | 0.3 |
| | YMFLKAESK | C | 80 | 0.3 |
| A11:01 | KIMFATLQR | C | 23 | 8.9 |
| | VLWTTPPLQH | V | 4539 | 0 |
| | YMFLKAESK | C | 1729 | 0 |
| A24:02 | MFLKAESKI | C | 332 | 0.2 |
| | YMFLKAESKI | C | 6,995 | 1.2 |
| B07:02 | FATLQRSSL | C | 14 | 0.7 |
| | EPHLALQPL | V | 17 | 7.2 |
| | KPKRDGYMF | C | 28 | 8.6 |
| | KPKRDGYMFL | C | 98 | 3.3 |
| | QPVLWTTPPL | V | 109 | 1.4 |
| | GPPARVPAV | C | 221 | 1.6 |
| | MFATLQRSSL | V | 267 | 0 |
| B08:01 | EPHLALQPL | V | 12 | 0 |
| | ESKIMFATL | C | 18 | 1.3 |
| | FLKAESKIM | C | 22 | 1.2 |
| | FATLQRSSL | C | 27 | 0 |
| | YMFLKAESKI | C | 32 | 0.4 |
| | IMKPKRDGYM | C | 33 | 0.4 |
| | MFATLQRSSL | C | 53 | 0 |
| | FLKAESKIMF | C | 82 | 0 |
| | LHFCRSSIM | C | 119 | 0 |

### Example 10—Multiple Neoepitopes Elicit CD8⁺ T Cell Responses

[0652] PBMC samples from a human donor were used to perform antigen specific T cell induction. CD8⁺ T cell inductions were analyzed after manufacturing T cells. Cell samples can be taken out at different time points for analysis. pMIHC multimers were used to monitor the fraction of antigen specific CD8⁺ T cells in the induction cultures. FIGS. 9A-9C and 10A-10B depict exemplary results showing the fraction of antigen specific CD8⁺ memory T cells induced with and SMLTGPPARV and MLTGPPARV, respectively. FIG. 9A depicts an exemplary result of a T cell response assay using PBMCs from 6 different healthy donors showing the fraction of antigen specific CD8⁺ T cells that responded to MLTGPPARV peptide analyzed by flow cytometry after stimulation or induction. An increase in the fraction of antigen specific T cells was observed. FIG. 9B depicts an exemplary result of a T cell response assay using PBMCs from a healthy donor showing fraction of antigen specific CD8⁺ T cells that responded to SMLTGPPARV peptide analyzed by flow cytometry after stimulation or induction. An increase in the fraction of antigen specific T cells was observed. Of the five healthy donors tested, 4 showed an increase in the fraction of antigen specific CD8⁺ T cells that responded to MLTGPPARV peptide. A T cell response assay using PBMCs from 3 different healthy donors showed an increase in the fraction of antigen specific CD8⁺ T cells that responded to VLPEPHLAL peptide analyzed by flow cytometry after stimulation or induction in one of the three donors. FIG. 9C depicts an exemplary result of a T cell response assay using PBMCs from HLA-A02:01, HLA-A03:01 HLA-A11:01, HLA-B07:02 and HLA-B08:01 healthy donors showing fraction of antigen specific CD8⁺ T cells that responded to SMLTGPPARV, MLTGPPARV, KIMFATLQR, KPKRDGYMFL KPKRDGYMF or ESKIMFATL peptide analyzed by flow cytometry after stimulation or induction. FIG. 10A depicts an exemplary result of a T cell response assay using PBMCs from an HLA-B07:02 healthy donor showing fraction of antigen specific CD8⁺ T cells that responded to stimulating peptide KPKRDGYMFLKAESKIMFATLQRSSLWCLCSNH (Minimal epitopes KPKRDGYMF and KPKRDGYMFL analyzed). FIG. 10B depicts an exemplary result of a T cell response assay using PBMCs from an HLA-A02:01 healthy donor showing fraction of antigen specific CD8⁺ T cells that responded to stimulating peptide SMLTGPPARVPAVPFDLH (Minimal epitopes SMLTGPPARV and MLTGPPARV analyzed).

### Example 11—Cytotoxicity Assay of Induced T Cells

[0653] A cytotoxicity assay was used to assess whether the induced T cell cultures can kill antigen expressing tumor lines. In this example, expression of active caspase 3 on alive and dead tumor cells was measured to quantify early cell death and dead tumor cells. In FIG. 33, the induced CD8⁺ responses were capable of killing antigen expressing tumor targets. The percent live caspase-A positive target cells of two samples mock transduced or transduced with a lentiviral expression vector encoding a GATA3 neoORF peptide are shown.

### Example 12—Peptide Synthesis

[0654] The peptides in Table 5 below were synthesized and purified. The predicted and determined molecular weights are shown. Also shown are the crude purities and final purities for the indicated peptides.

TABLE 5

| | | Theoretical | Determined | Crude | Final |
|---|---|---|---|---|---|
| ID | Sequences | MW | MW | Purity | Purity |
| L7 | EPCSMLTGPPARVPAVPFDLH | 2234.6 | 2235.2 | 47% | 97.4% |
| L8 | GPPARVPAVPFDLHFCRSSIMKPKRD | 2922.5 | 2923.5 | 51% | 99.5% |
| L9 | LHFCRSSIMKPKRDGYMFLKAESKI | 2986.6 | 2987.7 | 37% | 98.1% |
| L10 | KPKRDGYMFLKAESKIMFATLQR | 2759.3 | 2760.3 | 53% | 92.6% |
| L10b | KPKRDGYMFLKAESKIMFAT | 2361.9 | 2362.4 | 41% | 97.6% |
| L10b-4K | KKKKKPKRDGYMFLKAESKIMFAT | 2874.5 | 2874.9 | 57% | 85.7% |
| L10c | KPKRDGYMFLKAESKI | 1911.3 | 1911.4 | 69% | 98.4% |
| L11 | FLKAESKIMFATLQRSSLWCL | 2473.0 | 2473.0 | 66% | 86% |
| L11b | YMFLKAESKIMFATLQRSSLWCL | 2767.4 | 2767.2 | 37% | 80.0% |
| L11c | YMFLKAESKIMFATLQRSS | 2251.7 | 2252.4 | 38% | 95.9% |
| L11c-4K | KKKKYMFLKAESKIMFATLQRSS | 2764.3 | 2764.8 | 45% | 82.0% |
| L11d | KAESKIMFATLQRSSLWCL | 2212.7 | 2213.0 | 32% | 96.6% |
| L11d-4K | KKKKKAESKIMFATLQRSSLWCL | 2725.3 | 2725.8 | 28% | 82.3% |
| L11e | DGYMFLKAESKIMFAT | 1852.2 | 1852.3 | 39% | 91.6% |
| L11f | FLKAESKIMFATLQRS | 1870.2 | 1870.2 | 62% | 95.0% |
| L11g | ESKIMFATLQRSSLWC | 1900.2 | 1900.2 | 41% | 91.0% |
| L11h | FLKAESKIMFATLQR | 1783.1 | 1783.8 | 35% | 84% |
| L11i | ESKIMFATLQRSSL | 1610.87 | 1610.80 | 75% | 97% |
| L12 | KIMFATLQRSSLWCLCSNH | 2238.7 | 2238.6 | 31% | 68.0% |
| L12-4K | KKKKKIMFATLQRSSLWCLCSNH | 2751.3 | 2751.8 | 49% | 75.7% |
| L12b | MFATLQRSSLWCLCSNH | 1997.3 | 1997.8 | 47% | 98.7% |
| L12b-4K | KKKKMFATLQRSSLWCLCSNH | 2510 | 2510.4 | 39% | 92.7% |
| L12c | MFATLQRSSLWCLC | 1659.0 | 1659 | 57% | 90% |
| L12d | TLQRSSLWCLCSNH | 1647.9 | 1648 | 60% | 99% |
| L14 | SMLTGPPARVPAVPFDLH | 1905.2 | 1905.3 | 64.5% | 99.5% |
| L15 | KPKRDGYMFLKAESKIMFATLQRSSL | 3890.58 | 3891 | 37% | 96% |
| | WCLCSNH | | | | |
| L15b | KPKRDGYMFLKAESKIMFATLQRSSL | 3449.1 | 3449.5 | 42% | 87% |
| | WCL | | | | |
| L15c | DLHFCRSSIMKPKRDGYMFLKAESKIM | 4639.5 | 4640.4 | 40% | 90% |
| | FATLQRSSLWCL | | | | |

### Example 13—Solubility Tests of Synthetic GATA3 neoORF Peptide

[0655] The solubility of each peptide in Table 6 below was tested in the various indicated solutions. SS=sodium succinate. Formulation A tested included 4 DMSO, 5 mM sodium succinate (SS) in D5W. Formulation B tested included no DMSO, 5 mM SS in D5W. Formulation C tested included no DMSO, 0.25 mM SS in D5W. Synthesis of the 33mer L15, which contains two cysteies, was carried out using by creating pseudo-proline building blocks through conjugation of the side chains of ES, AT and SS in the sequence. This allowed for L15 to be purified to 95% purity and prevented aggregation during solid phase peptide synthesis.

### Table 6 Below Lists Peptide Solubilities

| | | | | | | | Poly | Poly | Poly | Poly | | Poly | | Poly |
|---|---|---|---|---|---|---|---|---|---|---|---|---|---|---|
| | | | | | | | ICLC | ICLC | ICLC | ICLC | | ICLC | | ICLC |
| | | | | | | | + | + | + | + | | + | 5 | + |
| | | | 5 | 0.5 | 0.75 | 0.25 | 0.5 | 0.75 | 0.25 | 5 | 0.25 | 0.25 | mM | 5 |
| | | | mM | mM | mM | mM | mM | mM | mM | mM | mM | mM | SS | mM |
| | | | SS in | SS in | SS in | SS in | SS in | SS in | SS in | SS in | SS in | SS in | in | SS in |
| | | | D5W | D5W | D5W | D5W | D5W | D5W | D5W | D5W | D5W | D5W | D5W | D5W |
| | | | w/ 4% | w/ 4% | w/ 4% | w/ 4% | w/ 4% | w/ 4% | w/ 4% | w/ 4% | w/o | w/o | w/o | w/o |
| ID | Sequence | AA | DMSO | DMSO | DMSO | DMSO | DMSO | DMSO | DMSO | DMSO | DMSO | DMSO | DMSO | DMSO |
| 7 | EPCSMLTGP | 21 | Yes | Yes | Yes | Yes | Yes | Yes | Yes | | Yes | Yes | Yes | Yes |
| | PARVPAVPF | | | | | | | | | | | | | |
| | DLH | | | | | | | | | | | | | |
| 14 | SMLTGPPAR | 18 | Yes | Yes | Yes | Yes | Yes | Yes | Yes | Yes | | | Yes | Yes |
| | VPAVPFDLH | | | | | | | | | | | | | |
| 8 | GPPARVPAV | 26 | Yes | Yes | Yes | Yes | Yes | Yes | Yes | | Yes | Yes | Yes | Yes |
| | PFDLHFCRS | | | | | | | | | | | | | |
| | SIMKPKRD | | | | | | | | | | | | | |
| 9 | LHFCRSSIM | 25 | Yes | Yes | Yes | Yes | | Yes | Yes | | Yes | | Yes | Yes |
| | KPKRDGYMF | | | | | | | | | | | | | |
| | LKAESKI | | | | | | | | | | | | | |
| 10 | KPKRDGYMF | 23 | Yes | | | Yes | | No | | No | | | | |
| | LKAESKIMF | | | | | | | | | | | | | |
| | ATLQR | | | | | | | | | | | | | |
| 11 | FLKAESKIM | 21 | | | | | | | No | | | | | |
| | FATLQRSSL | | | | | | | | | | | | | |
| | WCL | | | | | | | | | | | | | |
| 12 | KIMFATLQR | 19 | | | | | | | | | | | | |
| | SSLWCLCSN | | | | | | | | | | | | | |
| | H | | | | | | | | | | | | | |
| 10b | KPKRDGYMF | 20 | | Yes | Yes | Yes | | No | No | | | | | |
| | LKAESKIMF | | | | | | | | | | | | | |
| | AT | | | | | | | | | | | | | |
| 11b | YMFLKAESK | 23 | | | | | | | | | | | | |
| | IMFATLQRS | | | | | | | | | | | | | |
| | SLWCL | | | | | | | | | | | | | |
| 11c | YMFLKAESK | 19 | | Yes | Yes | Yes | | No | No | | | | | |
| | IMFATLQRS | | | | | | | | | | | | | |
| | S | | | | | | | | | | | | | |
| 11d | KAESKIMFA | 19 | | Yes | Yes | Yes | | | | | Yes | Yes | | |
| | TLQRSSLWC | | | | | | | | | | | | | |
| | L | | | | | | | | | | | | | |
| 12b | MFATLQRSS | 17 | | Yes | Yes | Yes | | No | No | | | | | |
| | LWCLCSNH | | | | | | | | | | | | | |
| 10b- | KKKKKPKRD | 25 | Yes | | | | | | | | | | | |
| 4K | GYMFLKAES | | | | | | | | | | | | | |
| | KIMFAT | | | | | | | | | | | | | |
| 11c- | KKKKYMFLK | 23 | | | | | | | | | | | | |
| 4K | AESKIMFAT | | | | | | | | | | | | | |
| | LQRSS | | | | | | | | | | | | | |
| 11d- | KKKKKAESK | 23 | Yes | | | | | | | | | | | |
| 4K | IMFATLQRS | | | | | | | | | | | | | |
| | SLWCL | | | | | | | | | | | | | |
| 12b- | KKKKMFATL | 20 | Yes | | | | | | | | | | | |
| 4K | QRSSLWCLC | | | | | | | | | | | | | |
| | SNH | | | | | | | | | | | | | |
| 12- | KKKKKIMFA | 23 | Yes | | | | | | | | | | | |
| 4K | TLQRSSLWC | | | | | | | | | | | | | |
| | LCSNH | | | | | | | | | | | | | |
| L10c | KPKRDGYMF | 16 | Yes | | | Yes | | | | Yes | Yes | Yes | Yes | Yes |
| | LKAESKI | | | | | | | | | | | | | |
| L11e | DGYMFLKAE | 16 | No | | | No | | | | | | | | |
| | SKIMFAT | | | | | | | | | | | | | |
| L11f | FLKAESKIM | 16 | | | Yes | Yes | | | | | Yes | Yes | | |
| | FATLQRS | | | | | | | | | | | | | |
| L11g | ESKIMFATL | 16 | No | | | Yes | | | No | | | | | |
| | QRSSLWC | | | | | | | | | | | | | |
| L11h | FLKAESKIM | 15 | | | | | | | | | | | | |
| | FATLQR | | | | | | | | | | | | | |
| L11i | ESKIMFATL | 14 | | | | | | | | | Yes | Yes | | |
| | QRSSL | | | | | | | | | | | | | |
| L12c | MFATLQRSS | 14 | No | | | No | | | | | | | | |
| | LWCLC | | | | | | | | | | | | | |
| L12d | TLQRSSLWC | 14 | Yes | | | Yes | | | Yes | Yes | Yes | | | |
| | LCSNH | | | | | | | | | | | | | |
| L15 | KPKRDGYMF | 33 | No | | | | | | | | Yes | Yes | | |
| | LKAESKIMF | | | | | | | | | | | | | |
| | ATLQRSSLW | | | | | | | | | | | | | |
| | CLCSNH | | | | | | | | | | | | | |
| L15b | KPKRDGYMF | 29 | | | | | | | | | | | | |
| | LKAESKIMF | | | | | | | | | | | | | |
| | ATLQRSSLW | | | | | | | | | | | | | |
| | CL | | | | | | | | | | | | | |
| L15c | DLHFCRSSI | 39 | | | | | | | | | | | | |
| | MKPKRDGYM | | | | | | | | | | | | | |
| | FLKAESKIM | | | | | | | | | | | | | |
| | FATLQRSSL | | | | | | | | | | | | | |
| | WCL | | | | | | | | | | | | | |
| 10b- | KKKKKPKRD | 24 | Yes | | | | | | | | | | | |
| 4K | GYMFLKAES | | | | | | | | | | | | | |
| | KIMFAT | | | | | | | | | | | | | |
| 11c- | KKKKYMFLK | 23 | | | | | | | | | | | | |
| 4K | AESKIMFAT | | | | | | | | | | | | | |
| | LQRSS | | | | | | | | | | | | | |
| 11d- | KKKKKAESK | 23 | Yes | | | | | | | | | | | |
| 4K | IMFATLQRS | | | | | | | | | | | | | |
| | SLWCL | | | | | | | | | | | | | |
| 12b- | KKKKMFATL | 21 | Yes | | | | | | | | | | | |
| 4K | QRSSLWCLC | | | | | | | | | | | | | |
| | SNH | | | | | | | | | | | | | |
| 12- | KKKKKIMFA | 23 | Yes | | | | | | | | | | | |
| 4K | TLQRSSLWC | | | | | | | | | | | | | |
| | LCSNH | | | | | | | | | | | | | |

### Example 14—Design of Pools of Synthetic GATA3 neoORF Peptide for Administration to Subjects

[0657] Various pools of the indicated GATA3 peptides were designed according to Table 7 below. For example, “Design 1” contains three peptide pools where pool 1 contains three peptides (i.e., L7, L8 and L14), pool 2 contains two peptides (i.e., L9 and L10c) and pool 3 contains two peptides (i.e., L15 and L11f). For example, “Design 6” contains two peptide pools where pool 1 contains four peptides (i.e., L7, L8, L9 and L14) and pool 2 contains two peptides (i.e., L15 and L11f). For example, “Design 10” contains four peptide pools where pool 1 contains five peptides (i.e., L7, L8, L9, L10c and L14), pool 2 contains one peptide (i.e., L15), pool 3 contains one peptide (i.e., L11f) and pool 4 contains one peptide (i.e., L11i). The concentration of each peptide in the pools can be changed according to one skilled in the art of preparing peptide formulations. Table 7 below lists description of GATA3 pool designs.

TABLE 7

| | | Design 1 | Design 2 | Design 3 | Design 4 | Design 5 | Design 6 | Design 7 | Design 8 | Design 9 | Design 10 | Design 11 |
|---|---|---|---|---|---|---|---|---|---|---|---|---|
| # | | 3 pools | 3 pools | 3 pools | 2 pools | 4 pools | 2 pools | 3 pools | 4 pools | 3 pools | 4 pools | 3 pools |
| 1 | L7 | 1 | 1 | 1 | 1 | 1 | 1 | 1 | 1 | 1 | 1 | 1 |
| 2 | L14 | 1 | 1 | 1 | 1 | 1 | 1 | 1 | 1 | 1 | 1 | 1 |
| 3 | L8 | 1 | 2 | 2 | 1 | 2 | 1 | 2 | 1 | 1 | 1 | 1 |
| 4 | L9 | 2 | 2 | 2 | 1 | 2 | 1 | 2 | 1 | 1 | 1 | 1 |
| 5 | L15 | 3 | 3 | 3 | 2 | 4 | 2 | 3 | 2 | 2 | 2 | 2 |
| 6 | L11f | 3 | 3 | 3 | 2 | 3 | 2 | 3 | 3 | 3 | 3 | N/A |
| 7 | L10c | 2 | 2 | 1 | 1 | 2 | N/A | N/A | 4 | 1 | 1 | 1 |
| 8 | L11i | N/A | N/A | N/A | N/A | N/A | N/A | N/A | N/A | N/A | 4 | 3 |

### Example 15—GATA3 neoORF Peptide Syntheses

[0658] Conventional synthesis is performed with a target of 700 mg crude material. The following Fmoc-amino acids with proper side chain protections were used in constructing L7 peptide (EPCSMLTGPPARVPAVPFDLH): Fmoc-Ala-OH.H₂O, Fmoc-Cys(Trt)-OH, Fmoc-Asp(OtBu)-OH, Fmoc-Glu(OtBu)-OH, Fmoc-Gly-OH, Fmoc-Leu-OH, Fmoc-Met-OH, Fmoc-Pro-OH, Fmoc-Arg(Pbf)-OH, Fmoc-Ser(tBu)-OH, Fmoc-Thr(tBu)-OH, and Fmoc-Val-OH. C-terminal histidine was incorporated into the sequence by being preloaded onto the resin by using either H-His(Trt)-2Cl-Trt resin or Fmoc-His(Trt)-Wang resin. Fmoc-Asp(OMpe)-OH may be used in place of Fmoc-Asp(OtBu)-OH to help improve synthesis, such as with sequence combinations of “DG” to minimize aspartamide formation.

[0659] The peptide sequences were swelled with dimethylformamide (DMF) and drained twice. Synthesis began with the deprotection of the N-α-FMOC protecting group using 20% piperidine in DMF with nitrogen dispensing to mix. After draining, the resin was washed with DMF. Next, a 0.4 M amino acid solution was added along with 0.4 M HCTU and 0.8 M DIEA. The coupling reaction was run with nitrogen dispensing to mix, followed by draining the reaction vessel (RV). The amino acid, HCTU, and DIEA additions were repeated for a double coupling cycle with the same mixing and draining parameters as the first coupling step. The resin was then washed with DMF again. This cycle was repeated for every amino acid residue. The final deprotection method removed the N-terminal Fmoc via 20% piperidine in DMF, and the resin was washed with DMF followed by washes with MeOH. The resin was on the instrument under nitrogen until removed.

[0660] For microwave synthesis, the same Fmoc-amino acid starting materials were used, with only the Fmoc-His(Trt)-Wang resin (but not H-His(Trt)-2Cl Trt resin) utilized to incorporate the C-terminal histidine.

[0661] On the microwave synthesizer, resin was swelled in DMF until it was transferred through the HT lines to the microwave reaction vessel (RV). While in the RV, the Fmoc-His(Trt)-OH loaded resin was treated with 25% pyrrolidine in DMF to remove the N-α-FMOC under 85° C./90 W followed by 100° C./20 W. Next, the RV was drained and washed with DMF, and drained again. The programmed Fmoc-amino acid was added (0.5 M in DMF) to the RV along with 4M DIC and 0.25 M Oxymapure. This coupling reaction followed 105° C./288 W heating followed by 105° C./73 W heating. This first deprotection was initially diluted with DMF, however this step was not required for any subsequent deprotections as the RV already contained DMF from the coupling reaction. The deprotection, wash, and coupling cycles were repeated for each residue until the peptide had been synthesized. For arginine residues, a double coupling step was performed, where after the single coupling was performed, the solution was drained, and the coupling step was repeated before proceeding to the deprotection. The final deprotection of the N-terminal Fmoc group was performed as above, except for being drained and washed twice with DMF before being transferred via DMF back to the original HT resin position.

[0662] After synthesis, the resin was transferred to a fritted syringe using DMF, rinsed with MeOH, and dried using a vacuum manifold. Then the resin was cleaved using Reagent K (82.5% trifluoroacetic acid (TFA), 5% water, 5% thioanisole, 5% phenol, and 2.5% ethanedithiol) using an upright holder on an oscillating shaker for three hours at room temperature.

[0663] The cleavage cocktail was then dispensed through a filtered syringe frit into cold diethyl ether or cold methyl tert-butyl ether (MTBE). Each syringe was then rinsed with a 95:5 trifluoroacetic acid:water solution by agitation. The rinse was then added to the rest of the cocktail/ether mixture. The mixture was then centrifuged. After decanting the ether, another cold ether wash was added. The container was vortexed and centrifuged again. This was repeated to thoroughly rinse the pellet. The final wash was decanted and the pellet dried via vacuum desiccator. A sample of the pellet was dissolved in solvent (e.g., DMSO, DMF, water, or acetonitrile) and analyzed via UPLC-MS for identity, crude purity, and retention time. Other peptides, for example L14 (SMLTGPPARVPAVPFDLH), L8 (GPPARVPAVPFDLHFCRSSIMKPKRD), L10c (KPKRDGYMFLKAESKI), L11h (FLKAESKIMFATLQR), and L11i (ESKIMFATLQRSSL) were made in a similar fashion, using amino acids and pre-loaded resins specific to those sequences.

### Example 16—GATA3 neoORF Peptide Syntheses

[0664] The following Fmoc-amino acids were used in synthesizing peptide L15 (KPKRDGYMFLKAESKIMFATLQRSSLWCLCSNH): Fmoc-Ala-OH.H₂O, Fmoc-Cys(Trt)-OH, Fmoc-Asp(OtBu)-OH, Fmoc-Glu(OtBu)-OH, Fmoc-Phe-OH, Fmoc-Gly-OH, Fmoc-Ile-OH, Fmoc-Lys(Boc)-OH, Fmoc-Leu-OH, Fmoc-Met-OH, Fmoc-Asn(Trt)-OH, Fmoc-Pro-OH, Fmoc-Gln(Trt)-OH, Fmoc-Arg(Pbf)-OH, Fmoc-Ser(tBu)-OH, Fmoc-Thr(tBu)-OH, Fmoc-Trp(Boc)-OH, and Fmoc-Tyr(tBu)-OH. C-terminal histidine was incorporated into the sequence by being preloaded onto the resin by using either H-His(Trt)-2Cl-Trt resin or Fmoc-His(Trt)-Wang resin. Fmoc-Asp(OMpe)-OH may be used in place of Fmoc-Asp(OtBu)-OH to help improve synthesis, such as with sequence combinations of “DG” to minimize aspartamide formation. Where serine (Ser, S) and threonine (Thr, T) residues are present, amino acid dipeptides (psuedoprolines) were incorporated to improve synthesis yields, such as Fmoc-Ser(tBu)-Ser(psi(Me,Me)pro)-OH in place of “SS”, Fmoc-Ala-Thr(psi(Me,Me)pro)-OH in place of “AT”, and Fmoc-Glu(OtBu)-Ser(psi(Me,Me)pro)-OH in place of “ES”. For some syntheses of L15, the combination of all three pseudoprolines (i.e., Fmoc-Ser(tBu)-Ser(psi(Me,Me)pro)-OH in place of “SS”, Fmoc-Ala-Thr(psi(Me,Me)pro)-OH in place of “AT”, and Fmoc-Glu(OtBu)-Ser(psi(Me,Me)pro)-OH) in place of “ES”) was used. For other syntheses of L15, the following pesudoproline and pseudoproline combinations were used, respectively: Fmoc-Ala-Thr(psi(Me,Me)pro)-OH in place of “AT” and Fmoc-Glu(OtBu)-Ser(psi(Me,Me)pro)-OH in place of “ES”; Fmoc-Ser(tBu)-Ser(psi(Me,Me)pro)-OH in place of “SS” and Fmoc-Glu(OtBu)-Ser(psi(Me,Me)pro)-OH in place of “ES”; Fmoc-Ser(tBu)-Ser(psi(Me,Me)pro)-OH in place of “SS” and Fmoc-Ala-Thr(psi(Me,Me)pro)-OH in place of “AT”; Fmoc-Ala-Thr(psi(Me,Me)pro)-OH in place of “AT”; Fmoc-Glu(OtBu)-Ser(psi(Me,Me)pro)-OH) in place of “ES”; and Fmoc-Ser(tBu)-Ser(psi(Me,Me)pro)-OH in place of “SS”.

[0665] Peptide sequences were swelled with DMF and drained twice. Synthesis began with the deprotection of the N-α-Fmoc group using 20% piperidine in DMF with nitrogen dispensing to mix. After draining, the resin was washed with DMF. Next, 0.4 M amino acid solution was added along with 0.4 M HCTU and 0.8 M DIEA. The coupling reaction was carried out with nitrogen dispensing to mix, followed by draining the reaction vessel (RV). The amino acid, HCTU, and DIEA additions were repeated for a double coupling cycle with the same mixing and draining parameters as the first coupling step. The resin was then washed with DMF again. This cycle was repeated for every amino acid residue. The final deprotection method removed the N-terminal Fmoc via 20% piperidine in DMF, and the resin was washed with DMF followed by washes with MeOH. The resin was on the instrument under cover of nitrogen until removed.

[0666] For microwave synthesis, the same amino acid starting materials were used, with only the Fmoc-His(Trt)-Wang resin (but not H-His(Trt)-2Cl-Trt resin) utilized to incorporate the C-terminal histidine.

[0667] On the microwave synthesizer, resin was swelled in DMF until it was transferred through the HT lines to the microwave reaction vessel (RV). While in the RV, the Fmoc-His(Trt) loaded resin was treated with 25% pyrrolidine in DMF to remove the N-α-Fmoc under 85° C./90 W followed by 100° C./20 W. This first deprotection was initially diluted with DMF; however, this step was not required for any subsequent deprotections as the RV already contained DMF from the coupling reaction. Next the RV was drained and washed with DMF, and drained again. The programmed Fmoc-amino acid was then added (0.5 M in DMF) to the RV along with 4 M DIC and 0.25 M Oxymapure. This coupling reaction followed 105° C./288 W heating followed by 105° C./73 W heating. The deprotection, wash, and coupling cycles were repeated for each residue until the peptide had been synthesized. For arginine residues, there was a double coupling step, where after the single coupling was performed, the solution was drained, and the coupling step was repeated before proceeding to the deprotection. The final deprotection of the N-terminal Fmoc group was performed the same as all other deprotections steps, except for being drained and washed twice with DMF before being transferred via DMF back to the original HT resin position.

[0668] After synthesis, the resin was transferred to a fritted syringe using DMF, rinsed with MeOH, and dried using vacuum manifold. The resin was then cleaved using Reagent K (82.5% trifluoroacetic acid (TFA), 5% water, 5% thioanisole, 5% phenol, and 2.5% ethanedithiol) using an upright holder on an oscillating shaker at room temperature.

[0669] The cleavage cocktail was then dispensed through filtered syringe frit into cold diethyl ether (or cold MTBE). Each syringe was then rinsed with a 95:5 trifluoroacetic acid: water solution by agitation. The rinse was then added to the rest of the cocktail/ether mixture. Then the mixture was centrifuged. After decanting the ether, another cold ether wash was added. The container was vortexed and centrifuged again. This was repeated to thoroughly rinse the pellet. The final wash was decanted and the pellet was dried via vacuum desiccator. A sample of the pellet was dissolved in solvent (e.g., DMSO, DMF, water, or acetonitrile) and analyzed via UPLC-MS for identity, crude purity, and retention time.

[0670] Other peptides, for example L9 (LHFCRSSIMKPKRDGYMFLKAESKI), were made in a similar fashion, using amino acids and pre-loaded resins specific to those sequences, as well as pseudoproline derivatives where serine (Ser, S) or threonine (Thr, T) residues are present and Fmoc-Asp(OMpe)-OH as described above.

### Example 17—Solubility Studies

[0671] A number of GATA3 peptides with neoepitopes were first tested for solubility using 5 mM sodium succinate (SS) in D5W with 4% DMSO. Based on the initial results the formulation strategy was improved by adjusting the sodium succinate (SS) concentration and DMSO amount, which lead to the selection of 7 peptides. The pooling strategies of these peptides were determined for solubility and compatibility with polyICLC. Based on these results, three pools were selected. Two pools each with only one peptide in 0.25 mM SS in D5W and a third pool with 5 peptides in 5 mM SS in D5W. The pH of the pools after being combined with polyICLC were all pH 5.0-6.0 and there was minimal loss during filtration.

[0672] The peptides screened for the following studies are all listed in Table 8.

TABLE 8

| | | | | Theo- | |
|---|---|---|---|---|---|
| | | | Theo- | retical | |
| | | Molec- | retical | % | |
| | | ular | TFA | peptide | % |
| Name | Sequence | Weight | content | content | purity |
| L7 | EPCSMLTGPPA | 2234.6 | 13.3 | 80.3 | 97 |
| | RVPAVPFDLH | | | | |
| L8 | GPPARVPAVPF | 2922.4 | 21.5 | 72.1 | 100 |
| | DLHFCRSSIMK | | | | |
| | PKRD | | | | |
| L9 | LHFCRSSIMKP | 2986.6 | 23.4 | 70.2 | 98 |
| | KRDGYMFLKAE | | | | |
| | SKI | | | | |
| L10B | KPKRDGYMFLK | 2361.8 | 22.5 | 71.1 | 98 |
| | AESKIMFAT | | | | |
| L11C | YMFLKAESKIM | 2251.7 | 16.8 | 76.8 | 93 |
| | FATLQRSS | | | | |
| L11D | KAESKIMFATL | 2212.6 | 17.1 | 76.5 | 92 |
| | QRSSLWCL | | | | |
| L12B | MFATLQRSSLW | 1997.3 | 14.6 | 79.0 | 93 |
| | CLCSNH | | | | |
| L10 | KPKRDGYMFLK | 2759.3 | 22.4 | 71.2 | 93 |
| | AESKIMFATLQ | | | | |
| | R | | | | |
| L10c | KPKRDGYMFLK | 1911.3 | 26.4 | 67.2 | 98 |
| | AESKI | | | | |
| L11 | FLKAESKIMFA | 2473.0 | 15.6 | 78.0 | 86 |
| | TLQRSSLWCL | | | | |
| L11e | DGYMFLKAESK | 1852.2 | 15.6 | 78.0 | 92 |
| | IMFAT | | | | |
| L11f | FLKAESKIMFA | 1870.2 | 19.6 | 74.0 | 95 |
| | TLQRS | | | | |
| L11g | ESKIMFATLQR | 1900.2 | 15.3 | 78.3 | 91 |
| | SSLWC | | | | |
| L12c | MFATLQRSSLW | 1659.0 | 12.1 | 81.5 | 90 |
| | CLC | | | | |
| L12d | TLQRSSLWCLC | 1647.9 | 17.2 | 76.4 | 99 |
| | SNH | | | | |
| L15 | KPKRDGYMFLK | 3890.6 | 19.0 | 74.6 | 98 |
| | AESKIMFATLQ | | | | |
| | RSSLWCLCSNH | | | | |
| L14 | SMLTGPPARVP | 1905.2 | 15.2 | 78.4 | 99 |
| | AVPFDLH | | | | |
| L11i | ESKIMFATLQR | 1610.9 | 17.5 | 76.1 | 96 |
| | SSL | | | | |

[0673] All buffers were prepared daily. D5W was prepared by weighing the dextrose and adding milliQ water to the dextrose to reach the appropriate volume. For example, water was added to 12.5 g dextrose to reach a total volume of 250 mL. To prepare 50 mL 5 mM SS in D5W by weighing 67.54 mg SS was weighed and added to D5W to reach 50 mL total volume. To prepare 0.25 mM SS in DSW, 2.5 mL of 5 mM SS in D5W was diluted with 47.5 mL of DSW.

[0674] The 00 peptide content of each peptide was determined as follows: The total theoretical TFA is equal to the sum of the number of positive charges (N-terminus, Arg, Lys, and His). That number was entered in to the following equation where MW is the molecular weight of the peptide:

00 TFA=100*((0% TFA*114.02)/((% TFA*114.02)+MW)) Equation 1.

[0675] This value was then used to calculate the percent peptide content using 6.45% as theoretical water content:

% Peptide=100−% TFA−6.45% Equation 2.

[0676] The target gross weight for these experiments was calculated using the equation below.

Target gross weight=(13.2*10000)/(% peptide content*% purity) Equation 3.

[0677] Peptides were weighed into 15 mL or 50 mL conical tubes using a Mettler Toledo XP105 Delta Mass analytical balance and the actual gross weight was recorded and used to determine how much DMSO to obtain 50 mg/mL. The calculation is shown below:

DMSO (μL)=(Actual gross weight (mg)*264 μl)/(Target gross weight (mg)) Equation 4.

[0678] The stock was then diluted to 2 mg/mLL (1 part DMSO stock, 24 parts buffer) in the appropriate formulation buffer.

[0679] Peptides weights and percent content were calculated as described above and the appropriate buffer was added directly to the peptides. The target gross weight calculated using Eq. 3 and the volume of buffer used to obtain 2 mg/mL peptide was calculated using Equation 5.

Buffer (ml)=(Actual gross weight (mg)*6.6 mL)/(Target gross weight (mg)) Equation 5.

[0680] Peptides were further diluted 1:4 with buffer to obtain 0.4 mg/mL or, only when indicated, was buffer added directly to the dry peptide to obtain 0.4 mg/mL. In the latter case, Equation 6 to determine the appropriate volume to add.

Buffer (ml)=(Actual gross weight (mg)*33 mL)/(Target gross weight (mg)) Equation 6.

[0681] The peptides were dissolved by inverting the conical tubes and not by sonicating or vortexing them.

[0682] To pool 5 peptides, equal volume from each 2 mg/mL stock was combined to obtain 0.4 mg/mL of each peptide. In the case of pools with less than 5 peptides, equal volumes of the peptides were combined then the solution was diluted with the appropriate buffer to obtain 0.4 mg/mL of each peptide. The pools were inverted 3-5 times to mix. The formulated peptides were transferred to glass vials to visualize solubility. Photographs were taken every two hours to note any changes in appearance.

[0683] PolyICLC was obtained commercially. Pools were combined at a 3:1 ratio of peptide to polyICLC using 150 μL polyICLC with 450 μL peptide pool in a 2 mL glass vial. The solution was inverted 3-5 times to mix and photographs were taken every two hours for 6 hours to note any changes in appearance. All pH measurements were made using a Mettler Toledo inLab Micro pH meter, which was calibrated every day before use. 100 μL of the sample being analyzed was removed and added to a microcentrifuge tube to measure the pH. The sample was then discarded. Samples by UPLC-MS (Waters Acquity H-Class with an Acquity QDa mass spectrometer). A 2 μL injection of each sample was analyzed in duplicate using an 8 minute gradient from 10:90 solvent A:B to 50:50 solvent A:B (A:0.1% TFA/water, B: 0.1% TFA:acetonitrile). Initial solubility of peptides in the standard formulation was determined for each peptide at 0.4 mg/mL and 2 mg/mL. Though photographs were taken, they did not always clearly show solubility since gels were often clear or the peptides for small glassy particulates when dissolved. The peptide solubilities in 5 mM SS/D5W with 4% DMSO are indicated in Table 9.

Table 9 Below Lists Peptide Solubilities and Observations in 5 mM SS/D5W with 4% DMSO

| | Peptide | | Peptide | |
|---|---|---|---|---|
| | Solubility | Formulation | Solubility | Formulation |
| Peptide | (at 2 mg/mL) | Observations | (at 0.4 mg/mL) | Observations |
| Name | (Y/N) | (at 2 mg/mL) | (Y/N) | (at 0.4 mg/mL) |
| L7 | Y | clear | Y | clear |
| L8 | Y | clear | Y | clear |
| L9 | Y | clear | Y | clear |
| L15 | N | cloudy | N | Cloudy over |
| | | | | 4 hours |
| L14 | Y | clear | Y | clear |
| L10 | Y | clear | Y | clear |
| L10c | Y | clear | Y | clear |
| L11 | N | cloudy, | N | Glassy |
| | | precipitation | | particulates |
| L11e | N | cloudy, large | N | Glassy |
| | | precipitates | | particulates |
| L11f | N | cloudy | N | Glassy |
| | | | | particulates |
| L11g | N | cloudy | N | Glassy |
| | | | | particulates |
| L12c | N | cloudy, large | N | Glassy |
| | | precipitates | | particulates |
| L12d | Y | clear | Y | clear |

[0684] Peptides that were insoluble in 5 mM SS were tested using 0.25 mM SS in D5W with 4% DMSO. The results are summarized in Table 10. Many of these peptides that were insoluble in 5 mM SS, were soluble at a concentration of 0.4 mg/mL in 0.25 mM SS/D5W with 4% DMSO after 6 hours and were tested in further studies using this lower SS concentration.

Table 10 lists Peptide Solubilities and Observations in 0.25 mM SS/D5W with 4% DMSO

| | Peptide | | Peptide | |
|---|---|---|---|---|
| | Solubility | Formulation | Solubility | Formulation |
| Peptide | (at 2 mg/mL) | Observations | (at 0.4 mg/mL) | Observations |
| Name | (Y/N) | (at 2 mg/mL) | (Y/N) | (at 0.4 mg/mL) |
| L15 | Y | clear | Y | clear |
| L11 | N (glassy | glass | Y | clear |
| | particulates) | particulates | | |
| L11e | N | gel | N | glassy |
| | | | | particulates |
| L11f | Y | clear | Y | clear |
| L11g | N (gel over | gel over time | Y | clear |
| | time) | | | |
| L12c | N | large | N | cloudy |
| | | particulates | | |
| L12d | Y | clear | Y | clear |

[0685] Based on these results peptides L7, L8, L9, L14, L10c, L11d, L11f and L15 were selected for formulation studies. Formulations without DMSO were tested as way to improve stability of formulated peptides and to slow down dimerization of cysteine-containing peptides. All peptides tested (L7, L8, L9, L14, L10c, L11d, L11f and L15) at a concentration of 0.4 mg/mL in 0.25 mM SS and were soluble without DMSO after 6 hours. Peptides L7, L8, L9, L10c, L12d and L14 were tested in 5 mM SS and were also soluble without DMSO after 6 hours. The pH values of the peptide formulations in 0.25 mM SS/D5W and 5 mM SS/D5W are listed in Table 11.

Table 11 Below Shows pH of 0.4 mg/mL Peptide Formulations in 0.25 mM SS/D5W and 5 mM SS/D5W

| Peptide Name | pH in 5 mM SS/D5W | pH in 0.25 mM SS/D5W |
|---|---|---|
| L7 | 6.4 | 4.5 |
| L8 | 6.4 | 5.0 |
| L9 | 6.4 | 4.6 |
| L10c | 6.4 | 4.3 |
| L11f | N/A | 5.0 |
| L14 | 6.4 | 4.2 |
| L15 | N/A | 4.8 |

[0686] Because the peptides reported in Table 11 were all soluble in 0.25 mM SS the initial pool designs were studied using the lower SS concentration. The pools were also designed with individual solubility in mind. Because L15 and L11f were soluble in low SS, those two peptides were pooled together. The first three pool designs are shown in Table 12.

### Table 12 Below Shows Initial Peptide Pools in 0.25 mM SS/D5W

| | Design 1 | Design 2 | Design 3 |
|---|---|---|---|
| Peptide name | 3 pools | 3 pools | 3 pools |
| L7 | 1 | 1 | 1 |
| L14 | 1 | 1 | 1 |
| L8 | 1 | 2 | 2 |
| L9 | 2 | 2 | 2 |
| L15 | 3 | 3 | 3 |
| L11f | 3 | 3 | 3 |
| L10c | 2 | 2 | 1 |

[0688] All peptides remained soluble after pooling. The pH values of the peptide pools with or without addition of polyICLC are given in Table 13.

Table 13 Below Lists pH of Peptide Pools from Table 12 with or without Addition of PolyICLC

| | | |
|---|---|---|
| Pool | pH of Pool | pH of Pool with polyICLC |

Design 1

| | | |
|---|---|---|
| Pool 1 | 3.4 | 4.7 |
| Pool 2 | 3.8 | 5.1 |
| Pool 3 | 4.0 | 5.5 |

Design 2

| | | |
|---|---|---|
| Pool 1 | 3.7 | 5.0 |
| Pool 2 | 3.6 | 4.8 |
| Pool 3 | 4.0 | 5.5 |

Design 3

| | | |
|---|---|---|
| Pool 1 | 3.5 | 4.7 |
| Pool 2 | 3.9 | 5.5 |
| Pool 3 | 4.0 | 5.5 |

[0689] The pools from each design were then mixed with polyICLC to test their compatibility with the adjuvant. Pool 3 and every pool containing peptide L10c precipitated when combined with polyICLC. Additionally, pools with 3 peptides had a pH below 5.0 when combined with polyICLC, which suggests that the buffering capacity should be higher when a pool contains more than two peptides.

[0690] Because L7, L8, L9, L10c, and L14 are all soluble in 5 mM SS they were tested in pools with the high SS concentration. Three pools were tested with these five peptides. One pool was without L10c, one had L10c alone, and the third had all five peptides. Because L11f and L15 were not soluble in this higher concentration they were formulated in 0.25 mM SS. However, due to the observed precipitation they were formulated to 0.4 mg/mL separately rather than in a single pool. Each of the peptides was soluble in their respective formulations. These pools were also compatible with polyICLC based on visualization and the pH values after the pools were combined with polyICLC were all between 5.0 and 6.3 (Table 14), which is appropriate for subcutaneous injection.

Table 14 lists pH of Peptide Pools without PolylCLC versus pH of Peptide Pools with PolylCLC

| Pool | pH of pool without polyICLC | pH of pool with polyICLC |
|---|---|---|
| Pool 1 | 5.6 | 5.6 |
| Pool 2 | 5.4 | 5.5 |
| L10c | 6.4 | 6.3 |
| L11f | 5.0 | 5.9 |
| L15 | 4.8 | 6.0 |

[0691] Peptide L11i was tested in D5W with various succinate concentrations without DMSO. The peptide appeared soluble in all concentrations of SS at 0.4 mg/mL. Some precipitation was observed at 2 mg/mL in the higher SS concentration. All samples looked the same when combined with polyICLC. The pH values of the formulations of 2 mg/mL or 0.4 mg/mL peptide L11i in 0.25 mM SS, 0.5 mM SS or 5 mM SS without polyICLC and 0.4 mg/mL peptide L11i in 0.25 mM SS 0.5 mM SS or 5 mM SS with polyICLC is shown in Table 15.

Table 15 lists pH of 2 mg/mL or 0.4 mg/mL L11i Peptide in 0.25 mM SS, 0.5 mM SS and 5 mM SS without PolylCLC and 0.4 mg/mL in 0.25 mM SS. 0.5 mM SS and 5 mM SS with PolylCLC

| | pH | | |
|---|---|---|---|
| | 2 mg/mL | 0.4 mg/mL | 0.4 mg/mL peptide L11i |
| | peptide L11i | peptide L11i | with polyICLC |
| 5 mM SS | 5.8 | 6.7 | 6.6 |
| 0.5 mM SS | 4.1 | 5.8 | 6.1 |
| 0.25 mM SS | 3.7 | 5.3 | 6.1 |

[0692] The finalized pools based on the results included Pool 1 (L7, L8, L9, L10c, and L14 in 5 mM SS/D5W), pool 2 (either L11i or L11f in 0.25 mM SS/D5W), and pool 3 (L15 in 0.25 mM SS/D5W). Each of these pools was tested for retention on a 0.2 μm filter from Pall (HP1002). The pre-filtered sample as well as sample after each of 2 filtrations were analyzed by UPLC-MS. Less than 3% of L11f and L11i was lost after the first filtration step and no additional peptide was lost after the second filtration step. Only 4.9% L15 was lost after the first filtration and then 1.3% was lost after the second filtration. Less than a total of 3% of each peptide in Pool 1 was lost after the two filtrations steps.

### CONCLUSIONS

[0693] A series of potential GATA3 peptides were tested for solubility in the formulation buffer contain 5 mM SS/D5W with 4% DMSO. Peptides that were insoluble in 5 mM SS were also tested in lower SS concentrations. Based on these results seven peptides were selected with five of them being soluble in 5 mM SS (L7, L8, L9, L10c, and L14) and the others being soluble in the lower concentration (L11f, L11i, and L15). Removal of DMSO was also tested, and may improve solubility and slow disulfide formation that can make UPLC analysis more difficult. Each of the peptides selected was soluble without DMSO.

[0694] Based on the solubility results, 3 pool designs were generated using 0.25 mM SS/D5W. Although the pools were soluble, some were not compatible with polyICLC. In some instances, precipitation was observed when pools containing L10c were mixed with polyICLC. The same observation was made when the pool containing both L11f and L15 were combined with polyICLC. Based on these results, a fourth set of pools was designed. The first pool contained L7, L8, L9, L10c, and L14 in 5 mM SS/D5W and was compatible with polyICLC. Peptides L15 and L11f or L11i were kept as individual peptides to be prepared by dissolving them directly at 0.4 mg/mL with 0.25 mM SS/D5W. These pools were all above pH 5.0 when mixed with polyICLC, which is acceptable for subcutaneous injection.

### Example 18 Prevalence of GATA3 neoORF Mutation

[0695] This example characterizes the prevalence and translational evidence of GATA3 neoORF mutation. The vaccine is comprised of a pool of long peptides that span a novel open reading frame in GATA3 (GATA Binding Protein 3) that is present only in cells harboring certain frame-shift mutations in this gene. Depending on the starting position of the frame-shift mutation, the resulting open reading frames may vary in length, but they all share a common translated region “GATA3 neoORF” FIG. 13 provides an exemplary amino acid sequence of a common translated region. Any genetic frame-shift mutations that result in GATA3 neoORF translated sequence is “GATA3 neoORF mutation”. Publically available genomic and proteomic datasets were investigated for prevalence of GATA3 neoORF mutation and evidence of translation for the GATA3 neoORF

### Materials and Methods

### Datasets

[0696] MSK-IMPACT breast cancer dataset: The MSK-IMPACT breast cancer dataset (Razavi et al., 2018) is a public dataset available at the cBioPortal for Cancer Genomics (http://www.cbioportal.org/study?id=breast_msk_2018). This dataset contains sequencing data using MSK-IMPACT, a hybridization capture-based next-generation sequencing assay, which analyzes all protein-coding exons between 341 and 468 of cancer-associated genes, from a total of 1918 breast tumor specimens and patient-matched normal from 1756 patients. Publicly available mutation data and clinical data that includes ER status, HER2 status, and overall survival, were downloaded for this study.

[0697] TCGA breast cancer proteome dataset: The TCGA breast cancer proteome dataset (NCI CPTAC et al., 2016) is a public dataset available at the CPTAC data portal (https://cptac-data-portal.georgetown.edu/cptac/s/S015). This dataset contains tandem mass spectrometry data from the global proteome of 105 TCGA breast cancer patients using iTRAQ protein quantification methods. Publicly available raw data were downloaded for this study.

### Mutation Prevalence Analysis

[0698] GATA3 neoORF identification: Each mutation event of the GATA3 gene from the MSK-IMPACT breast cancer dataset is mapped to the GATA3 transcript ENST00000346208.3 from the human genome (hg19, GRCh37 Genome Reference Consortium Human Reference 37), and then translated in silico into a full-length protein. If a full-length protein contains the GATA3 neoORF sequence, the sample that contains this mutation event is labeled as GATA3 neoORF positive.

[0699] GATA3 neoORF prevalence: For all subjects in a cohort, if a subject has at least one sequenced tumor sample that was identified as GATA3 neoORF positive, the subject is considered GATA3 neoORF positive. The GATA3 neoORF prevalence is defined as the percentage of GATA3 neoORF positive subjects in the cohort.

Peptide Identification from Proteomics Data

[0700] Protein sequence database: The protein sequence database contains 63,691 protein sequences from the UCSC protein sequence database (the February 2009 human reference sequence, GRCh37/hg19), and one full-length protein that contains the GATA3 neoORF sequence.

[0701] Peptide identification: The raw data of the TCGA breast cancer proteome dataset were analyzed with Comet search engine (http://comet-ms.sourceforge.net), an open source software package for interpretation of tandem mass spectra. Comet (version 2017.01 rev.2) was used to search all MS/MS spectra from the TCGA breast cancer proteome dataset against the UCSC protein sequence database. MS/MS spectra with precursor ions up to +6 were allowed in the search. Mass error tolerance for precursor ions was ±10 parts per million (ppm), and a m/z bin width of 0.02 was used for fragment ions. All searches were bounded by trypsin such that each peptide matched to the experimental spectrum had to conform to the cleavage specificity of the enzyme, i.e. C-terminal side of lysines or arginines. A maximum of 2 missed cleavages was allowed. A fixed modification of +144.1021 Da was applied to the N-terminus of a peptide and every Lysine residue as expected for iTRAQ labeling. Variable modifications included up to two oxidized Methionine residues per peptide. A fixed modification of +57.021464 Da was applied to all cysteines for carbamidomethylated cysteines. During the search, decoy peptides were automatically generated as part of the Comet search engine for estimating target-decoy false discovery rates. The search results were processed by Percolator (version 3.02.0) to calculate peptide level q-values, a conventional metric to estimate the false discovery rate of peptide identification using tandem mass spectrometry data. A standard threshold (q-value <0.01) was used to accept peptides identified from the dataset so that less than 1% of the accepted peptides were likely false discoveries.

[0702] GATA3 neoORF evidence of translation: Peptides specifically derived from a protein sequence containing the GATA3 neoORF and not from any other protein in the UCSC protein sequence database were called the GATA3 neoORF specific peptides. The identification of GATA3 neoORF specific peptides was considered evidence of translation of the GATA3 neoORF.

### Results

[0703] GATA3 neoORF Mutation Prevalence in Breast Cancer

[0704] From the MSK-IMPACT breast cancer dataset of 1,756 patients, mutation prevalence analysis was performed (Materials and Methods of Section 1 above) and identified 91 patients that were GATA3 neoORF positive. Of these 91 patients, 77 patients were reported to be HR+Her2(−), and 62 patients were reported to be metastatic at diagnosis. The prevalence of GATA3 neoORF positive patients in each subgroup are reported in Table 16 below. Among the HR+Her2(−) patients, GATA3 neoORF positive patients do not have a statistical difference in overall survival compared to all HR+Her2(−) patients (regardless of their GATA3 neoORF status) (p-value=0.246) (FIG. 14).

Table 16 Below Lists Prevalance of GATA3 neoORF

| | Number | Number of patients positive | |
|---|---|---|---|
| | of patients | for GATA3 neoORF | Prevalence |
| all patients | 1,756 | 91 | 5.2% |
| HR + Her2(−) | 1,272 | 77 | 6.1% |
| HR + Her2(−) | 856 | 62 | 7.2% |
| metastatic | | | |

Table 17 Below Lists GATA3 neoORF Specific Peptides and Other Peptides Mapped to Canonical GATA3 Identified from the TCGA Breast Cancer Proteome Dataset

| # | peptide sequence | mapped proteins |
|---|---|---|
| 1 | HGLEPCSMLTGPPAR | GATA3 neoORF |
| 2 | RDGYMFLK | GATA3 neoORF |
| 3 | SSIMKPK | GATA3 neoORF |
| 4 | AGTSCANCQTTTTTLWR | GATA3 |
| 5 | ALGSHHTASPWNLSPFSK | GATA3 |
| 6 | DGTGHYLCNACGLYHK | GATA2, GATA3, GATA4, |
| | | GATA5 |
| 7 | DVSPDPSLSTPGSAGSAR | GATA3 |
| 8 | ECVNCGATSTPLWR | GATA3 |
| 9 | EGIQTR | GATA2, GATA3, GATA4, |
| | | GATA6 |
| 10 | EGIQTRNR | GATA2, GATA3 |
| 11 | KEGIQTR | GATA2, GATA3, GATA4, |
| | | GATA6 |
| 12 | KVHDSLEDFPK | GATA3 |
| 13 | LHNINRPLTMK | GATA3 |
| 14 | LHNINRPLTMKK | GATA3 |
| 15 | MNGQNRPLIKPK | GATA2, GATA3 |
| 16 | NANGDPVCNACGLYYK | GATA2, GATA3 |
| 17 | NSSFNPAALSR | GATA3 |
| 18 | RAGTSCANCQTTTTTLWR | GATA3 |
| 19 | RDGTGHYLCNACGLYHK | GATA2, GATA3, GATA4, |
| | | GATA5 |
| 20 | SSTEGRECVNCGATSTPLWR | GATA3 |
| 21 | VHDSLEDFPK | GATA3 |
| 22 | YQVPLPDSMK | GATA3 |

[0705] Investigation of a breast cancer genomic dataset showed that GATA3 neoORF was prevalent in 6-7% of the HR+Her2(−) breast cancer patients depending on their metastatic status. Multiple GATA3 neoORF specific peptides along with other peptides that mapped to canonical GATA3 were identified indicating translation of GATA3 neoORF. Together, these results demonstrated that GATA3 neoORF mutation is prevalent in HR+Her2(−) breast cancer, and when present, the GATA3 neoORF can be translated to yield protein products.

### Example 19 GATA3 neoORF Epitope Count Across HLA Types

[0706] This example provides estimation of the typical number of epitopes that could be expected from the GATA3 neoORF across a patient population with diverse HLA types.

### Materials and Methods

[0707] All peptides (lengths 8-11) within the common region of the GATA3 neoORF (as defined in EXAMPLE 18) were assessed for presentation probability using an in silico prediction algorithm that jointly considers gene expression, HLA binding potential, and proteasomal processing potential. The algorithm combines the three variables into an overall presentation prediction via a logistic regression fit on mono-allelic mass spectrometry HLA-I profiling data. The following assumptions and tools were used for defining the three input variables:

### Expression

[0708] Based on The Cancer Genome Atlas (TCGA) RNA-Seq data, breast cancer samples have a median GATA3 expression of ˜700 transcripts per million (TPM). Assuming that mutant allele and wildtype allele contribute equally to overall GATA3 expression, we estimated that the neoORF transcript would be expressed at 350 TPM.

### HLA Binding Potential

[0709] U.S. allele frequencies were imputed based on ethnicity-specific frequencies and assuming that the U.S. population is 62.3% European, 13.3% African American, 6.8% Asian Pacific Islander, and 17.6% Hispanic (Table 18). For the 21 most common HLA-A alleles and the 49 most common HLA-B alleles, peptide binding predictions were ran using the tool NetMHCpan-3.0 (21 and 49 alleles provide 95% population coverage for HLA-A and HLA-B, respectively).

### Processing Potential

[0710] A processing potential predictor was trained using publically available mass spectrometry-based HLA-I profiling data, for example, as described in Abelin. J. et al. Immunity, 2017, Bassani-Sternberg, M. et al Molecular & Cellular Proteomics 2015, a neural network configuration that determines processing potential based on the upstream and downstream sequence context of each peptide.

[0711] To simulate epitope count per patient, simulant HLA genotypes were created by randomly drawing two HLA-A and two HLA-B alleles (with replacement, to allow for homozygosity) according to their overall U.S. frequencies (Table 18). Most simulant patients had 4 distinct alleles, but because homozygosity was allowed, some simulant patients had just 2 or 3 distinct alleles. For each peptide-allele pair in a simulant patient, a Bernoulli coin flip parameterized by the imputed presentation probability (derived from the above model) was conducted; a positive result was taken to indicate that the given peptide would be presented on the given allele. For each simulant patient, the total number of unique positive peptides was summed to determine the total number of reactive epitopes (meaning that a peptide presented on multiple alleles in the simulation was only counted once). The results were further culled by counting nested epitopes (e.g. a positive 9mer completely contained within a positive 10mer) as a single epitope. Ten thousand patients were simulated in this manner using the statistical programming language R.

### Table 18 Below Lists Allele Frequencies Used in the Simulation

| | | African | Asian Pacific | | USA |
|---|---|---|---|---|---|
| Allele | European | American | Islander | Hispanic | Average |
| A*02:01 | 29.6% | 12.5% | 9.5% | 19.4% | 24.2% |
| A*01:01 | 17.2% | 4.7% | 5.1% | 6.7% | 12.9% |
| A*03:01 | 14.3% | 8.1% | 2.6% | 7.9% | 11.6% |
| A*24:02 | 8.7% | 2.2% | 18.2% | 12.3% | 9.1% |
| A*11:01 | 5.6% | 1.6% | 17.9% | 4.6% | 5.8% |
| A*29:02 | 3.3% | 3.6% | 0.1% | 4.2% | 3.3% |
| A*23:01 | 1.7% | 10.8% | 0.2% | 3.7% | 3.1% |
| A*68:01 | 2.5% | 3.7% | 1.9% | 4.7% | 3.0% |
| A*26:01 | 2.9% | 1.4% | 3.9% | 2.9% | 2.8% |
| A*32:01 | 3.1% | 1.4% | 1.3% | 2.7% | 2.7% |
| A*31:01 | 2.4% | 1.0% | 3.2% | 4.8% | 2.7% |
| A*30:01 | 1.3% | 6.9% | 2.1% | 2.1% | 2.3% |
| A*30:02 | 0.9% | 6.2% | 0.1% | 2.8% | 1.9% |
| A*68:02 | 0.8% | 6.5% | 0.0% | 2.5% | 1.8% |
| A*33:03 | 0.1% | 4.5% | 9.4% | 1.3% | 1.5% |
| A*25:01 | 1.9% | 0.5% | 0.1% | 0.9% | 1.4% |
| A*33:01 | 1.0% | 2.1% | 0.1% | 2.0% | 1.3% |
| A*02:06 | 0.2% | 0.0% | 4.8% | 3.9% | 1.1% |
| A*02:05 | 0.8% | 1.9% | 0.3% | 1.5% | 1.0% |
| A*74:01 | 0.0% | 5.2% | 0.1% | 0.8% | 0.8% |
| A*02:02 | 0.1% | 4.2% | 0.0% | 0.7% | 0.7% |
| B*07:02 | 14.0% | 7.3% | 2.6% | 5.5% | 10.8% |
| B*08:01 | 12.5% | 3.8% | 1.6% | 4.5% | 9.2% |
| B*44:02 | 9.0% | 2.1% | 0.8% | 3.3% | 6.5% |
| B*35:01 | 5.7% | 6.5% | 4.3% | 6.4% | 5.8% |
| B*44:03 | 5.0% | 5.4% | 4.2% | 6.1% | 5.2% |
| B*15:01 | 6.7% | 1.0% | 3.5% | 2.9% | 5.0% |
| B*51:01 | 4.5% | 2.2% | 6.3% | 5.8% | 4.6% |
| B*40:01 | 5.6% | 1.3% | 8.0% | 1.4% | 4.5% |
| B*18:01 | 4.6% | 3.6% | 1.2% | 4.0% | 4.1% |
| B*14:02 | 3.1% | 2.2% | 0.1% | 4.1% | 3.0% |
| B*57:01 | 3.8% | 0.5% | 2.1% | 1.2% | 2.8% |
| B*27:05 | 3.3% | 0.7% | 0.8% | 1.7% | 2.5% |
| B*13:02 | 2.6% | 1.0% | 2.3% | 1.2% | 2.1% |
| B*53:01 | 0.3% | 11.2% | 0.1% | 1.6% | 2.0% |
| B*38:01 | 2.2% | 0.2% | 0.5% | 1.9% | 1.7% |
| B*40:02 | 1.0% | 0.4% | 3.1% | 4.9% | 1.7% |
| B*49:01 | 1.3% | 2.8% | 0.1% | 2.4% | 1.6% |
| B*52:01 | 1.0% | 1.4% | 3.7% | 2.7% | 1.5% |
| B*35:03 | 1.6% | 0.4% | 2.4% | 1.4% | 1.4% |
| B*58:01 | 0.5% | 3.5% | 5.8% | 1.5% | 1.4% |
| B*55:01 | 1.7% | 0.4% | 0.5% | 1.1% | 1.4% |
| B*15:03 | 0.1% | 6.2% | 0.0% | 1.6% | 1.2% |
| B*45:01 | 0.4% | 4.5% | 0.2% | 1.5% | 1.1% |
| B*37:01 | 1.3% | 0.5% | 1.5% | 0.6% | 1.1% |
| B*50:01 | 0.8% | 0.9% | 0.7% | 1.5% | 0.9% |
| B*39:01 | 1.0% | 0.4% | 1.3% | 1.0% | 0.9% |
| B*35:02 | 1.1% | 0.1% | 0.2% | 1.1% | 0.9% |
| B*42:01 | 0.0% | 5.5% | 0.0% | 0.6% | 0.8% |
| B*14:01 | 0.8% | 0.9% | 0.3% | 0.9% | 0.8% |
| B*39:06 | 0.5% | 0.2% | 0.0% | 2.0% | 0.7% |
| B*58:02 | 0.0% | 4.1% | 0.0% | 0.5% | 0.6% |
| B*57:03 | 0.0% | 3.4% | 0.0% | 0.7% | 0.6% |
| B*48:01 | 0.1% | 0.0% | 2.0% | 2.2% | 0.6% |
| B*41:01 | 0.4% | 0.5% | 0.1% | 1.3% | 0.5% |
| B*15:10 | 0.0% | 3.0% | 0.1% | 0.5% | 0.5% |
| B*07:05 | 0.2% | 0.7% | 2.0% | 0.5% | 0.5% |
| B*56:01 | 0.5% | 0.2% | 0.8% | 0.4% | 0.5% |
| B*39:05 | 0.0% | 0.0% | 0.1% | 2.3% | 0.4% |
| B*41:02 | 0.4% | 0.7% | 0.0% | 0.6% | 0.4% |
| B*46:01 | 0.0% | 0.0% | 6.1% | 0.0% | 0.4% |
| B*35:08 | 0.4% | 0.0% | 0.2% | 0.9% | 0.4% |
| B*15:17 | 0.3% | 0.6% | 0.5% | 0.7% | 0.4% |
| B*35:12 | 0.0% | 0.0% | 0.0% | 1.9% | 0.3% |
| B*15:16 | 0.0% | 1.7% | 0.0% | 0.5% | 0.3% |
| B*81:01 | 0.0% | 2.0% | 0.1% | 0.3% | 0.3% |
| B*40:06 | 0.0% | 0.0% | 3.7% | 0.3% | 0.3% |
| B*35:17 | 0.0% | 0.0% | 0.0% | 1.6% | 0.3% |
| B*15:02 | 0.0% | 0.1% | 3.6% | 0.0% | 0.3% |
| B*38:02 | 0.0% | 0.0% | 3.7% | 0.0% | 0.2% |

### Results

[0713] The analysis described in the methods section showed that 95% of patients can present >2 HLA-I epitopes from the GATA3 neoORF (FIG. 15). The GATA3 neoORF can harbor multiple presentable HLA-I epitopes regardless of the HLA genotype of the patient based on details presented above. This shows the effectiveness of a therapy inducing T cell responses against these predicted neoantigens. A subset of the predicted epitopes were selected for validation in follow up studies detailed in Examples 20, 21, 22, 23 below.

### Example 20 Biochemical Measurements of the Epitope

[0714] The example below provides biochemical validation of the affinity of epitopes from the GATA3neoORF. A large number of epitopes can bind to many HLA alleles (as described in Example 19). In this example epitopes were evaluated for their ability to bind to several common HLA alleles, namely HLA-A02:01, HLA-1B07:02 and HLA-1B08:01. Both the affinity and stability of the binding between the epitopes and their predicted HLA were evaluated.

[0715] The affinity is a measure of the strength of the binding of the epitope to the HLA. Strong binding (generally defined as <500 nM) is an important characteristic for a neoantigen that can be targeted by T cells. This is because the neoantigen must be presented on the surface of tumor cells and therefore must outcompete other antigens produced by the tumor cell for the binding pocket of one of the HLA molecules, as only one peptide can bind to an individual HLA molecule at a time. Further, it has been shown that immunogenic epitopes tend to have strong affinity for their specific HLA.

[0716] The stability is a measure of how long a given epitope stays bound to the cognate HLA. Stable binding (generally defined as >1 hour) is also an important characteristic for a neoantigen that can be targeted by T cells. Epitopes must stay bound to tumor cells on the cell surface in order to be recognized by T cells. Further, like affinity, it has been previously shown that immunogenic epitopes tend to bind stably to their specific HLA.

[0717] In order to evaluate the stability and affinity of epitopes for their cognate HLA molecules, peptides were synthesized at purities >70% (by UV analysis of % Area) and diluted to 20 mM or less and their affinities and stabilities were measured.

[0718] In this example, the affinity and stability of the binding between 14 epitopes and cognate HLA molecules is reported. Four epitopes were studied on HLA-A02:01, five epitopes were studied on HLA-B07:02, and eight epitopes were studied on HLA-B08:01 (three epitopes were studied on both HLA-B07:02 and HLA-B08:01). All peptides demonstrated strong binding by affinity, ranging from 9.5 nM to 242.8 nM. Stabilities ranged from 0 hours to 21.7 hours, with at least one epitope on each allele exceeding 1 hour. These results show that there is at least one strong epitope derived from the GATA3 neoORF per allele.

### Materials and Methods

### Selection of Epitopes for Biochemical Measurements

[0719] Multiple epitopes derived from the GATA3 neoORF were selected for confirmation of their ability to bind to a specific common HLA allele, namely HLA-A02:01, HLA-B07:02, or HLA-B08:01. These epitopes were predicted to range from weak to strong binders.

### Solid Phase Peptide Synthesis

[0720] Peptides were made on 5 μmol scale using solid phase peptide synthesis on the Intavis Peptide Synthesizer. Fmoc deprotections were performed using 20% piperidine in DMF and rinsed with neat DMF. All amino acids were double coupled at 15 minute durations at room temperature using 60 μL of 0.5M amino acid (6eq), 55 μL 0.5 M HCTU (5.5eq), 5 μL NMP (0.5eq) and 14 μL 4 M NMM (11.2eq). After each double coupling cycle, acetyl capping was performed by adding 100 μL of a DIEA solution (made first as a 2M solution in NMP and then diluted to 12.5% using DMF) and 6.25% acetic anhydride in DMF for 15 minutes before vacuum draining and rinsing with DMF. The deprotection, wash, double coupling, acetyl capping, wash cycle was repeated for each amino acid in the sequence. Final deprotection was performed with 20% piperidine in DMF and final washes with DMF, EtOH, and DCM. A final drain dry was completed for 5 minutes on the instrument after which plate bottoms were rinsed with DCM.

### Cleavage of Peptides

[0721] The peptides were cleaved using a solution of 92.5% TFA, 2.5% TIPS, 2.5% H₂O, 2.5% EDT. After 1 hour the plates were vacuum drained into 1.2 mL Micronic racks. After a total of 3 hours the peptides were then precipitated with cold diethyl ether via centrifugation.

### UPLC-UV-MS Analysis of Peptides

[0722] Crude peptides were dried and re-suspended in 1:1 ACN:H₂O containing 0.1% TFA and kept at −80° C. until completely frozen. Peptides were then freeze-dried to isolate the peptide in powder form. Peptide powders were dissolved first in neat DMSO and then diluted 3:1 in DMSO:H₂O for UPLC-UV-MS analysis. UV monitoring was performed at a wavelength of 214 nm with the mass detector range spanning 200-1250 Da. The UPLC-UV-MS method used for peptides less than 9 amino acids in length comprised a gradient of 0-100% mobile phase B (0.085% TFA in acetonitrile, with a corresponding mobile phase A of 0.1% TFA in water) over 5 minutes on a 2.1×50 mm 1.7 μM BEH Acquity UPLC column, while the method for peptides greater than 9 amino acids comprised a gradient of 10-80% mobile phase B over 8 minutes on a 2.1×100 mm 1.7 μM BEH Acquity UPLC column.

### Determination of Peptide Concentration by A214 Method

[0723] Crude peptides were dissolved in neat DMSO with concentrations of 2-5 mg/mL for evaluation by the A214 method. The peptide peak area of a UPLC-UV chromatogram is proportional to the amount of peptide injected for analysis and the extinction coefficient of the peptide at the detection wavelength. Therefore, the concentration of a peptide sample can be determined by comparing its UV peak area with the UV peak area of a reference peptide of known concentration and considering the respective extinction coefficients. The following equation is used to calculate the peptide concentration:

C=Cref*(Asam*Eref*Vref)/(Aref*Esam*Vsam) Equation 7.

[0724] where, C is the peptide sample concentration in mM, C_{ref} is the reference peptide concentration in mM, Aₛₐₘ is the UV peak area of peptide sample, A_{ref} is the UV peak area of reference peptide, E_{ref} is the extinction coefficient of reference peptide in M⁻¹ cm⁻¹, Eₛₐₘ is the extinction coefficient of peptide sample in M⁻¹ cm⁻¹, Vₛₐₘ is the injection volume of sample, and V_{ref} is the injection volume of reference peptide.

[0725] The extinction coefficient of a peptide at 214 nm is predicted by combining the extinction coefficients of individual amino acids and peptide bonds. A reference peptide with sequence of RAKFKQLL (peptide ID LS-18) at 0.2 mg/mL is run in sequence with the crude peptide samples on the UPLC-UV-MS. The UV peak areas and the calculated extinction coefficients are then used to calculate the peptide concentration in mM.

### Affinity Measurements

[0726] The binding affinity of a peptide to HLA molecules was measured by assessing its ability to outcompete a defined radiolabeled peptide for the binding pocket on the HLA molecule. This was done by purifying HLA molecules and incubating them with multiple concentrations of the peptide of interest and a high-affinity binding peptide that is radiolabeled. After 2 days of incubation, unbound radiolabeled peptide was separated by size-exclusion gel filtration chromatography, and the fraction of HLA molecules that have the radiolabeled peptide was determined. Peptides that have low percentages of bound radiolabeled peptide at the end of the assay have a strong affinity for the HLA. Quantitatively, the concentration of the peptide of interest required to inhibit the binding of the radiolabeled peptide by 50% can be determined by a regression analysis of the inhibition across multiple concentrations. This IC50 measurement was used as an approximation of the true binding affinity.

[0727] In the first wave of peptides analyzed, the actual concentrations of the peptides were known based on A214 measurements and any necessary corrections based on concentration were done. In the second wave of peptides analyzed, the concentration of all peptides were presumed to be 20 mM and initial IC50s were calculated based on that presumption, with adjustments accounting for actual concentration later performed. For peptides with actual concentration below 20 mM, the measured IC50 was corrected by multiplying by the actual concentration as determined by the A214 method and dividing by 20 mM.

### Stability Measurements

[0728] To measure the binding stability of peptides to Class I MHC, synthetic genes encoding biotinylated MHC-I heavy and light chains are expressed in E. coli and purified from inclusion bodies using standard methods. The light chain (β2m) was radio-labeled with iodine (125I), and combined with the purified MHC-I heavy chain and peptide of interest at 18° C. to initiate pMHC-I complex formation. These reactions were carried out in streptavidin coated microplates to bind the biotinylated MHC-I heavy chains to the surface and allow measurement of radiolabeled light chain to monitor complex formation. Dissociation was initiated by addition of higher concentrations of unlabeled light-chain and incubation at 37° C. Stability was defined as the length of time in hours it takes for half of the complexes to dissociate, as measured by scintillation counts. Duplicate measurements were performed. The average of the two measurements was taken as the stability.

### Results

### Affinity Measurements

### Table 19 Below Lists Epitope Affinity Measurements.

| | | | Actual | | |
|---|---|---|---|---|---|
| | | | Peptide | Meas- | Cor- |
| | | | Concen- | ured | rected |
| | Peptide | HLA | tration | IC50 | IC50 |
| Wave | Sequence | Allele | (mM) | (nM) | (nM) |
| 2 | MLTGPPARV | A02:01 | 13.7 | 15.4 | 10.6 |
| 1 | SMLTGPPARV | A02:01 | 20.0 | 15.4 | 15.4 |
| 2 | TLQRSSLWCL | A02:01 | 8.4 | 281.2 | 117.7 |
| 1 | YMFLKAESKI | A02:01 | 20.0 | 165.9 | 165.9 |
| 2 | FATLQRSSL | B07:02 | 20.0 | 14.0 | 14.0 |
| 2 | KPKRDGYMF | B07:02 | 20.0 | 28.2 | 28.2 |
| 2 | KPKRDGYMFL | B07:02 | 17.0 | 115.2 | 98.1 |
| 2 | GPPARVPAV | B07:02 | 15.7 | 281.9 | 221.2 |
| 2 | MFATLQRSSL | B07:02 | 15.2 | 350.3 | 266.9 |
| 2 | ESKIMFATL | B08:01 | 15.2 | 23.3 | 17.7 |
| 2 | FLKAESKIM | B08:01 | 20.0 | 21.9 | 21.9 |
| 2 | FATLQRSSL | B08:01 | 19.4 | 27.5 | 26.6 |
| 1 | YMFLKAESKI | B08:01 | 20.0 | 32.0 | 32.0 |
| 2 | IMKPKRDGYM | B08:01 | 16.5 | 40.2 | 33.2 |
| 2 | MFATLQRSSL | B08:01 | 20.0 | 53.4 | 53.4 |
| 2 | FLKAESKIMF | B08:01 | 18.3 | 90.0 | 82.3 |
| 2 | LHFCRSSIM | B08:01 | 14.2 | 167.3 | 118.7 |

*Note that actual peptide concentration and measured IC50 reported here are rounded from the raw data, but corrected IC50 values were calculated using the un-rounded raw data.

### Stability Measurements

### Table 20 Below Lists Stability Measurements

| | | | Experiment | Experiment | Average |
|---|---|---|---|---|---|
| | | | 1 | 2 | half- |
| | | HLA | half-life | half-life | life |
| Wave | Sequence | Allele | (hours) | (Hours) | (Hours) |
| 2 | TLQRSSLWCL | A02.01 | 0.5 | 0.5 | 0.5 |
| 2 | MLTGPPARV | A02.01 | 5.8 | 5.8 | 5.8 |
| 1 | YMFLKAESKI | A02:01 | 0.6 | 0.6 | 0.6 |
| 1 | SMLTGPPARV | A02:01 | 21.7 | 21.8 | 21.7 |
| 2 | KPKRDGYMFL | B07.02 | 3.3 | 3.3 | 3.3 |
| 2 | KPKRDGYMF | B07.02 | 8.3 | 9.0 | 8.6 |
| 2 | FATLQRSSL | B07.02 | 0.7 | 0.6 | 0.7 |
| 2 | MFATLQRSSL | B07.02 | 0.0 | 0.0 | 0.0 |
| 2 | GPPARVPAV | B07.02 | 1.5 | 1.8 | 1.6 |
| 2 | FLKAESKIMF | B08.01 | 0.0 | 0.0 | 0.0 |
| 2 | FATLQRSSL | B08.01 | 0.0 | 0.0 | 0.0 |
| 2 | MFATLQRSSL | B08.01 | 0.0 | 0.0 | 0.0 |
| 2 | ESKIMFATL | B08.01 | 1.0 | 1.6 | 1.3 |
| 2 | FLKAESKIM | B08.01 | 0.8 | 1.5 | 1.2 |
| 2 | LHFCRSSIM | B08.01 | 0.0 | 0.0 | 0.0 |
| 2 | IMKPKRDGYM | B08.01 | 0.4 | 0.4 | 0.4 |
| 1 | YMFLKAESKI | B08:01 | 0.4 | 0.5 | 0.4 |

[0731] In Example 20, predicted epitopes from the GATA3 neoORF on multiple common HLA molecules (HLA-A02:01, HLA-B07:02, HLA-B08:01) were evaluated. All epitopes were determined to have a strong affinity (<500 nM). A subset of these epitopes were also stable binders (>1 hour), with at least one strong binder on each of the HLA alleles evaluated. These data show that GATA3 neoORF epitopes are present across multiple HLA alleles.

### Example 21: Generation of Cell Line with GATA3 Mutation and HLA Allele

[0732] This Example described preparation of a cell line with the GATA binding protein 3 (GATA3) novel open reading frame (neoORF) mutation and high-prevalence HLA alleles, HLA-A02:01 and HLA-B07:02. This cell line can be used as an in vitro surrogate of tumor cells that contain GATA3 neoORF mutations. Cell lines that naturally harbor the specific GATA3 neoORF of focus are not readily available, one was prepared by stable lentiviral transduction of a commonly used cell line, HEK293T. This cell line was chosen because it naturally expresses two of the common HLA alleles, HLA-A02:01 and HLA-B07:02. This modified cell line was used for functional assays with T cells (Example 25 and Example 26). Additionally, this cell line was used for validation of neoantigens processing/presentation from the GATA3 neoORF on multiple HLA alleles (Example 22). For these studies, the HLA alleles were transiently transfected into the modified cell line.

### Materials and Methods

### Overview of Generation of GATA3 Mutation Cell Line

[0733] The generation of GATA3 mutation transduced HEK 293T cell entailed (a) GATA3 mutation encoded plasmid design, production of lenti-virus, transduction of GATA3 mutation to HEK 293T cell line, and selection of transduced cells. These steps for generation of GATA3 mutation cell line are described below.

### Cell Lines and Culture

[0734] HEK 293T cell lines were purchased from the American Type Culture Collection (Rockford, Md., USA) and maintained in DMEM 10% FBS, and Pen/Strep medium.

### GATA3 Mutation Encoded Plasmid Design

### GATA3 Mutation Gene

[0735] For the efficient expression of GATA3 mutation gene plasmid construct, 600 bp GATA binding protein3 (GATA3) wild-type sequence from 1473 to 2074 (which contains coding DNA sequence (CDS) sequence from 558 to 1892) was obtained from NCBI Reference Sequence. NM_001002295.01. GATA3 mutation sequence was further generated by deleting 2 nucleotides at 1734 and 1735 from reference sequence (FIG. 16). GATA3 mutation sequence then translates a frameshift at position 87 of amino acid sequence from wild-type sequence (FIG. 17). This DNA construct can cover 87 residues of wild type GATA3 amino acid sequence and 114 of the frameshifted GATA3 neoORF amino acid sequence which is caused by the deletion.

### GATA3 Mutation Plasmid Design

[0736] GATA3 mutation sequences were codon-optimized, synthesized and cloned into pCDH-CMV-Puro vector (Genescript) (FIG. 18).

### Lenti-Virus Production

[0737] Lenti-X 293T cells (ClonTech) were cultured in complete culture media (DMEM containing 10% FBS, Pen/Strep) and transfected with GATA3 mutation encoded lentiviral plasmid to produce lentivirus for GATA3 mutation gene. The day before the transfection, 8×10⁵ of the cells were plated per well of a 6 well plate. The culture media was replaced at the day of transfection. 4 μg of lentiviral construct plasmid and 4.6 μL of the lentiviral packaging plasmid mix (Sigma-Aldrich) were mixed in Opti-MEM (Thermo Fisher). The mixture was mixed with 10 μL of FuGENE HD (Promega) and added to the cells directly. At 24 hours later, the media was replaced with the fresh complete culture media. The supernatant contained lentivirus was harvested at 72 hours after transfection.

### Transduction of GATA3 Mutation

[0738] 5×10⁵ of HEK 293T cells (ATCC) were plated in 2 mL of DMEM media contained 6 μg/mL polybrene and 10% FBS on 12-well plate. 130 μL of supernatant containing GATA3 lentivirus were added to cells directly. The cells were incubated at 5% CO₂ incubator. The media was replaced with DMEM media with 10% FBS and Pen/Strep at 24 hours.

### Puromycin Selection

[0739] 1 μg/mL concentration of puromycin treatment started at day 2 after transduction of GATA3 mutation lenti-virus. The cells were cultured and expanded with DMEM media with 10% FBS, Pen/Strep and 1 μg/mL of Puromycin until harvest.

Transfection with HLA-Encoding Constructs

[0740] 1.5×10⁷ of GATA3 mutation transduced HEK 293T cells were seeded in T175 flask. 15 μg of HLA-A02:01, HLA-B07:02 or HLA-B08.01 encoded plasmids (Genewiz) were mixed with 70 μL of Fugene HD (Promega) and incubated at room temperature for 15 minutes. The mixtures of each HLA type plasmids and Fugene HD were added to GATA3 mutation transduced HEK 293T cells in T175 flask for transfection. The 3 different HLA transfected and GATA3 mutation transduced HEK 293T cells were cultured for 48 hours before harvest.

### Harvest GATA3 Mutation Transduced and HLA Transfected Cells

[0741] The cells were washed with 1×PBS and added 0.25% Trypsin-EDTA (Thermo-Fisher scientific). After 3 minutes of incubation at 37° C., the cells were resuspended and harvested with DMEM media with 10% FBS and Pen/Strep. Washing steps were performed 3 times which includes centrifugation at 1,500 rpm for 5 min followed by suspension with PBS buffer. The cell pellets were snap frozen on dry-ice in 70% ethanol. The frozen cell pellets were stored at −80° C. freezer for proteomics analysis.

### Results

[0742] GATA3 mutation transduced HEK 293T were used as target cells to evaluate a GATA3 specific TCR functional assay, and as material to evaluate GATA mutation presentation on HLA-A02.01 by mass-spectrometry (Example 22). Outlined below are results demonstrating generation of GATA3 mutation expressed HEK 293T cells

### GATA3 Mutation Plasmid Construct

[0743] The GATA3 mutation encoded plasmid construct was generated and evaluated by DNA sequencing at GENEWIZ. DNA sequencing data of final GATA3 mutation encoded plasmid is 100% matched with GATA3 mutation gene sequence designed (FIG. 19). After the restriction enzyme AfIII digestion, two DNA bands were observed between 5000 bp and 3000 bp in lane 2 of a gel electrophoresis assay. These bands correlate with the expected sizes of 4243 bp and 3424 bp, respectively (FIG. 20).

### GATA3 Mutation Transduction and Harvest

[0744] HEK 293T cells were used for GATA3 mutation transduction. The transduced cells were cultured until reached 200×10⁶ cells of total cell number. At the harvest date, 1×10⁶ cells were used for HLA-Class I and HLA-Class II expression by Flow cytometer (FIG. 21). 99.5% cells were HLA-ClassI positive. 193×10⁶ cells were frozen for proteomics analysis.

### HLA Transfection

[0745] GATA3 mutation transduced HEK 293T cells were transiently transfected with BAP tagged HLA-A02.01, BAP tagged HLA-B07.02, and BAP tagged HLA-B08.01 encoded expression plasmid. The transfected cells were cultured for 48 hours and harvested. At the harvest date, 1×10⁶ cells were used for HLA-A02.01 and HLA-Class I expression by Flow cytometry (FIG. 22). Non-transfected (FIG. 22A), HLA-A02.01 transfected (FIG. 22B), HLA-B07.02 transfected (FIG. 22C) and HLA-B08.01 transfected (FIG. 22C) GATA3 HEK293T cells. All transfected cells highly expressed HLA-A02.01 and HLA-Class I.

[0746] A modified cell line was generated that expresses the GATA3 neoORF by stable transduction of lentivirus containing the mutated GATA3 gene into HEK293T cells. The GATA3 mutation transduced HEK 293T cells expressed HLA-Class I. This cell line was subsequently used as a target for functional assays with T cells specific for GATA3 neoantigens (Example 25 and Example 26). Further, after transfection with several common HLA alleles, these cell lines showed wider distribution of HLA-Class I and HLA-A:02 expression level and were used for evaluation of processing and presentation of multiple neoantigens on these alleles (Example 22).

### Example 22 Validation of GATA3 neoORF Peptide Epitopes by Mass Spectrometry

[0747] This Example provides validation of the endogenous processing and presentation of predicted peptide epitopes derived from the common region of the GATA binding protein 3 (GATA3) novel open reading frame (neoORF) for binding to HLA-A*02:01, HLA-B*07:02, and HLA-B*08:01 heterodimers by mass spectrometry. HEK293T cells were engineered to stably express GATA3 neoORF and transiently transfected to express biotin acceptor peptide (BAP)-tagged HLA alleles of interest. Prediction of allele-specific peptide epitopes and the generation of HEK293T cells are described in Example 19 and Example 21, respectively. HLA-peptide complexes were isolated from cellular lysates by affinity pull-down of the biotinylated BAP-tag expressed on the alpha chain of each HLA class I heterodimer. Peptide ligands were released from HLA-peptide complexes by treatment with acid and desalted by reverse phase liquid chromatography. HLA-peptide ligands were further separated by nano liquid chromatography coupled to a high-resolution tandem mass spectrometer (nLC-MS/MS). Predicted peptide epitopes derived from the GATA3 neoORF were subjected to targeted nLC-MS/MS whereby a priori knowledge of each peptide epitope's precursor mass was used to select each peptide epitope's theoretical monoisotopic mass for fragmentation by higher-energy collisional dissociation (HCD) and subsequent peptide sequencing. GATA3 neoORF peptide epitopes were matched to resulting tandem mass spectra (MS/MS) by a database matching algorithm against a database containing the GATA3 neoORF, and by spectral comparison of precursor mass (MS) and MS/MS spectra corresponding to their synthetic peptide counterparts.

[0748] In total, five peptide epitopes from the common region of the GATA3 neoORF that bound to three different HLA heterodimers were detected by nLC-MS/MS in engineered HEK293T cells. For HLA-A*02:01, the following two of four targeted peptide epitopes were detected: SMLTGPPARV and MLTGPPARV. For HLA-B*07:02, the following two of five targeted peptide epitopes were detected: KPKRDGYMF and KPKRDGYMFL. For HLA-B*08:01, the following one of eight targeted peptide epitopes was detected: ESKIMFATL. The detection and identification of these peptide epitopes by nLC-MS/MS from cells expressing the GATA3 neoORF demonstrated that they are endogenously processed and subsequently bound by HLA heterodimers.

### Materials and Methods

[0749] Peptides: ¹²C4N synthetic peptides corresponding to GATA3 neoORF peptide epitopes were synthesized.

Table 21 Below Provides List of Synthetic Peptides Corresponding to GATA3 neoORF Predicted Peptide Epitopes.

| | | | Theoretical |
|---|---|---|---|
| | | | Molecular |
| Allele | Sequence | Length | Weight |
| HLA-A*02:01 | SMLTGPPARV | 10 | 1027.5484 |
| HLA-A*02:01 | MLTGPPARV | 9 | 940.5164 |
| HLA-B*07:02 | KPKRDGYMF | 9 | 1140.5750 |
| HLA-B*07:02 | KPKRDGYMFL | 10 | 1253.6590 |
| HLA-B*08:01 | ESKIMFATL | 9 | 1054.5368 |

### Cell Culture

[0750] Generation of the engineered HEK293T cells that stably express the GATA3 neoORF and the transient transfection of each affinity-tagged (BAP-tagged) allele was described in Example 21. Table 22 lists the samples and cell numbers that were used for targeted nLC-MS/MS.

Table 22 Below Provides Summary of Samples for Targeted nLC-MS/MS

| | | Cell Number | |
|---|---|---|---|
| Allele | Cell Type | (×10⁶) | Pull-Down Type |
| HLA-A*02:01 | HEK293T | 55 | Affinity-tag |
| HLA-B*07:02 | HEK293T | 61 | Affinity-tag |
| HLA-B*08:01 | HEK293T | 60 | Affinity-tag |

### Pull-Down of Affinity-Tagged (BAP-Tagged) HLA-Peptide Complexes

[0751] Frozen cell pellets containing BAP-tagged HLA molecules were thawed on ice for 20 min then gently lysed by hand pipetting in cold lysis buffer [20 mM Tris-Cl pH 8, 100 mM NaCl, 6 mM MgCl₂, 1.5% (v/v) Triton X-100, 60 mM octyl B-D-glucopyranoside, 0.2 mM of 2-Iodoacetamide, 1 mM EDTA pH 8, 1 mM PMSF, 1× cOmplete EDTA-free protease inhibitor cocktail] at a ratio of 1.2 mL lysis buffer per 50×10⁶ cells. Lysates were incubated end/over/end at 4° C. for 15 min with Benzonase nuclease at a ratio of >250 units Benzonase per 50×10⁶ cells to degrade DNA/RNA, then centrifuged at 15,000×g at 4° C. for 20 min to remove cellular debris and insoluble materials. Cleared supernatants were transferred to new tubes and BAP-tagged HLA molecules were biotinylated by incubating end/over/end at room temperature for 10 min in a 1.5 mL tube with 0.56 μM biotin, 1 mM ATP/1 mM magnesium acetate, and 3 μM BirA. The supernatants were incubated end/over/end at 4° C. for 30 min with a volume corresponding to 200 μL of Pierce high-capacity NeutrAvidin beaded agarose resin slurry per 50×10⁶ cells to affinity-enrich biotinylated-HLA-peptide complexes. Finally, the HLA-bound resin was washed four times with 1 mL of cold wash buffer (20 mM Tris-Cl pH 8, 100 mM NaCl, 60 mM octyl B-D-glucopyranoside, 0.2 mM of 2-Iodoacetamide, 1 mM EDTA pH 8), then washed four times with 1 mL of cold 10 mM Tris-Cl pH 8. Between washes, the HLA-bound resin was gently mixed by hand then pelleted by centrifugation at 1,500×g at 4° C. for 1 min. The NeutrAvidin beaded agarose resin was washed three times with 1 mL cold PBS before use. The washed HLA-bound resin was stored at −80° C. for less than one week prior to HLA-peptide elution.

### HLA-Peptide Desalting, Reduction, and Alkylation

[0752] HLA-peptides were eluted from affinity-tagged (BAP-tagged) HLA complexes and simultaneously desalted using a Sep-Pak solid-phase extraction system. In brief, Sep-Pak cartridges were attached to a 24-position solid phase extraction manifold, activated two times with 200 μL of methanol followed by 100 μL of 50% (v/v) acetonitrile/0.1% (v/v) formic acid, then washed four times with 500 μL of 1% (v/v) formic acid. To dissociate HLA-peptides from affinity-tagged (BAP-tagged) HLA molecules and facilitate peptide binding to the tC18 solid-phase, 400 μL of 3% (v/v) acetonitrile/5% (v/v) formic acid was added to the tubes containing HLA-bound beaded agarose resin. The slurry was mixed by pipetting, then transferred to the Sep-Pak cartridges. The tubes and pipette tips were rinsed with 1% (v/v) of formic acid (2×200 μL) and the rinsate was transferred to the cartridges. 100 femtomole of Pierce peptide retention time calibration mixture was added to the cartridges as a loading control. The beaded agarose resin was incubated two times for 5 min with 200 μL of 10% (v/v) acetic acid to further dissociate HLA-peptides from the affinity-tagged (BAP-tagged) HLA molecules, then washed four times with 500 μL of 1% (v/v) formic acid. HLA-peptides were eluted off the tC18 into new 1.5 mL micro tubes by step fractionating with 250 μL of 15% (v/v) acetonitrile/1% (v/v) formic acid followed by 250 μL of 30% (v/v) acetonitrile/1% (v/v) formic acid. The solutions used for activation, sample loading, washing, and elution flowed via gravity, but vacuum (≥−2.5 PSI) was used to remove the remaining eluate from the cartridges. Eluates containing HLA-peptides were frozen, dried via vacuum centrifugation, and stored at −80° C. before being subjected to reduction, alkylation, and a second desalting workflow.

[0753] Reduction and alkylation of cysteine-containing HLA-peptides was performed in 1.5 mL micro tubes as follows. Dried peptides were solubilized in 200 μL of 10 mM Tris-Cl pH 8, then reduced by incubating with 5 mM of dithiothreitol at 60° C. for 30 min while shaking at 1,000 rpm in a ThermoMixer. Reduced thiols were alkylated by incubating with 15 mM 2-Iodoacetamide at room temperature for 30 min in the dark. Any unreacted 2-Iodoacetamide was quenched by incubating with 5 mM of Dithiothreitol for 15 min at room temperature in the dark. Samples were desalted immediately after reduction and alkylation.

[0754] Secondary desalting of the HLA-peptide samples was performed with in-house built StageTips packed using two 16-gauge punches of an Empore C18 solid phase extraction disk. StageTips were activated two times with 100 μL of methanol followed by 50 μL of 99.9% (v/v) acetonitrile/0.1% (v/v) formic acid, then washed three times with 100 μL of 1% (v/v) formic acid. The peptide solution was acidified by adding 200 μL of 3% (v/v) acetonitrile/5% (v/v) then and loaded onto StageTips. The tubes and pipette tips were rinsed with 200 μL of 3% (v/v) acetonitrile/5% (v/v) followed by 1% (v/v) formic acid (2×100 μL) and the rinse volume was transferred to the StageTips. StageTips were washed five times with 100 μL of 1% (v/v) formic acid. Peptides were eluted into 1.5 mL micro tubes using a step gradient of 20 μL 15% (v/v) acetonitrile/1% (v/v) formic acid followed by two 20 μL cuts of 30% (v/v) acetonitrile/1% (v/v) formic acid. Sample loading, washes, and elution were performed on a tabletop centrifuge with a maximum speed of 1,800-3,500×g at room temperature. Eluates were frozen, dried via vacuum centrifugation, and stored at −80° C.

HLA-Peptide Sequencing by nLC-MS/MS

[0755] All nLC-MS/MS analyses employed the same liquid chromatography separation conditions described below. Peptides were chromatographically separated using an EASY-nLC 1200 System fitted with a PicoFrit 75 μm inner diameter and 10 μm emitter nanospray column packed at −1,000 psi of pressure with helium to ˜35 cm with ReproSil-Pur 120A C18-AQ 1.9 μm packing material and heated at 60° C. during separation. The column was equilibrated with 10× bed volume of solvent A [3% (v/v) acetonitrile/0.1% (v/v) formic acid], samples were loaded in 4 μL 3% (v/v) acetonitrile/5% (v/v) formic acid, and peptides were eluted with a linear gradient of 6-40% Solvent B [80% (v/v) acetonitrile/0.1% (v/v) formic acid] over 84 min, 40-60% Solvent B over 9 min, then held at 90% Solvent B for 5 min and 50% Solvent B for 9 min to wash the column. Linear gradients for were run at a rate of 200 nL/min.

[0756] Peptides were eluted into an Orbitrap Fusion Lumos Tribrid Mass Spectrometer equipped with a Nanospray Flex Ion source at 2.5 kV. A full-scan MS was acquired at a resolution of 15,000 from 300-1,800 m/z with an automatic gain control (AGC) target of 4×10⁵ and 50 millisecond max injection time. Each MS scan was followed by MS/MS scans according to an inclusion mass list (Table 23) comprising the calculated ion masses (m/z) of the targeted GATA3 neoORF peptide epitopes and their predicted charge states (z). Additional calculated ion masses were included for peptides that met the following criteria: i) multiple charge states expected due to presence of one or more basic residues in the sequence and/or ii) peptides containing amino acids that were expected to be modified during sample processing such as cysteine, methionine, and N-terminal glutamine. Maximum injection times varied between 100 milliseconds and 120 milliseconds to maintain cycle times of 2-2.8 sec across the chromatographic peak. MS/MS scans were acquired at a resolution of 15,000 from 110 to 1,300-1,500 m/z, using an isolation width of 1 m/z, normalized HCD collision energy of 34, and an AGC target of 1×10⁵.

| | | Peptide | | |
|---|---|---|---|---|
| # | Allele | Sequence* | m/z | z |
| 1 | HLA-A*02:01 | MLTGPPARV | 471.2655 | 2 |
| 2 | HLA-A*02:01 | mLTGPPARV | 479.2629 | 2 |
| 3 | HLA-A*02:01 | SMLTGPPARV | 514.7815 | 2 |
| 4 | HLA-A*02:01 | SmLTGPPARV | 522.7790 | 2 |
| 5 | HLA-A*02:01 | TLQRSSLWCamcL | 421.8887 | 3 |
| 6 | HLA-A*02:01 | TLQRSSLWCamcL | 632.3294 | 2 |
| 7 | HLA-A*02:01 | TLQRSSLWCcysL | 442.5495 | 3 |
| 8 | HLA-A*02:01 | TLQRSSLWCcysL | 663.3207 | 2 |
| 9 | HLA-A*02:01 | TLQRSSLWCL | 402.8815 | 3 |
| 10 | HLA-A*02:01 | TLQRSSLWCL | 603.8186 | 2 |
| 11 | HLA-A*02:01 | YMFLKAESKI | 410.5581 | 3 |
| 12 | HLA-A*02:01 | YmFLKAESKI | 415.8898 | 3 |
| 13 | HLA-A*02:01 | YMFLKAESKI | 615.3336 | 2 |
| 14 | HLA-A*02:01 | YmFLKAESKI | 623.3310 | 2 |
| 1 | HLA-B*07:02 | FATLQRSSL | 511.7851 | 2 |
| 2 | HLA-B*07:02 | GPPARVPAV | 432.2585 | 2 |
| 3 | HLA-B*07:02 | KPKRDGYMF | 381.1989 | 3 |
| 4 | HLA-B*07:02 | KPKRDGYmF | 386.5306 | 3 |
| 5 | HLA-B*07:02 | KPKRDGYMF | 571.2948 | 2 |
| 6 | HLA-B*07:02 | KPKRDGYmF | 579.2922 | 2 |
| 7 | HLA-B*07:02 | KPKRDGYMFL | 418.8936 | 3 |
| 8 | HLA-B*07:02 | KPKRDGYmFL | 424.2253 | 3 |
| 9 | HLA-B*07:02 | KPKRDGYMFL | 627.8368 | 2 |
| 10 | HLA-B*07:02 | KPKRDGYmFL | 635.8343 | 2 |
| 11 | HLA-B*07:02 | MFATLQRSSL | 577.3053 | 2 |
| 12 | HLA-B*07:02 | mFATLQRSSL | 585.3028 | 2 |
| 1 | HLA-B*08:01 | ESKIMFATL | 520.2783 | 2 |
| 2 | HLA-B*08:01 | ESKImFATL | 528.2757 | 2 |
| 3 | HLA-B*08:01 | FATLQRSSL | 511.7851 | 2 |
| 4 | HLA-B*08:01 | FLKAESKIM | 356.2037 | 3 |
| 5 | HLA-B*08:01 | FLKAESKIm | 361.5353 | 3 |
| 6 | HLA-B*08:01 | FLKAESKIM | 533.8019 | 2 |
| 7 | HLA-B*08:01 | FLKAESKIm | 541.7994 | 2 |
| 8 | HLA-B*08:01 | FLKAESKIMF | 405.2265 | 3 |
| 9 | HLA-B*08:01 | FLKAESKImF | 410.5581 | 3 |
| 10 | HLA-B*08:01 | IMKPKRDGYM | 413.5510 | 3 |
| 11 | HLA-B*08:01 | ImKPKRDGYM | 418.8826 | 3 |
| 12 | HLA-B*08:01 | ImKPKRDGYm | 424.2143 | 3 |
| 13 | HLA-B*08:01 | IMKPKRDGYM | 619.8228 | 2 |
| 14 | HLA-B*08:01 | ImKPKRDGYM | 627.8203 | 2 |
| 15 | HLA-B*08:01 | ImKPKRDGYm | 635.8178 | 2 |
| 16 | HLA-B*08:01 | LHFCamcRSSIM | 384.1881 | 3 |
| 17 | HLA-B*08:01 | LHFCamcRSSIm | 389.5197 | 3 |
| 18 | HLA-B*08:01 | LHFCamcRSSIM | 575.7784 | 2 |
| 19 | HLA-B*08:01 | LHFCamcRSSIm | 583.7759 | 2 |
| 20 | HLA-B*08:01 | LHFCcysRSSIM | 606.7698 | 2 |
| 21 | HLA-B*08:01 | LHFCcysRSSIm | 614.7672 | 2 |
| 22 | HLA-B*08:01 | MFATLQRSSL | 577.3053 | 2 |
| 23 | HLA-B*08:01 | mFATLQRSSL | 585.3028 | 2 |
| 24 | HLA-B*08:01 | YMFLKAESKI | 410.5581 | 3 |
| 25 | HLA-B*08:01 | YmFLKAESKI | 415.8898 | 3 |
| 26 | HLA-B*08:01 | YMFLKAESKI | 615.3336 | 2 |
| 27 | HLA-B*08:01 | YmFLKAESKI | 623.3310 | 2 |

*lowercase m = oxidized methionine, Camc = carbamidomethylated cysteine, Ccys = cysteinylated cysteine

### Database Searching

[0757] Mass spectra were interpreted using the Spectrum Mill software package. MS/MS spectra were excluded from searching if they did not have a precursor MH+ in the range of 600-2,000 Da, had a precursor charge >5, or had <4 detected peaks. Merging of similar spectra with the same precursor m/z acquired in the same chromatographic peak was disabled. MS/MS spectra were searched against a database that contained all UCSC Genome Browser genes with hg19 annotation of the genome and its protein coding transcripts (63,691 entries) combined with a full-length GATA3 neoORF sequence and 150 common contaminants. Prior to the database search, all MS/MS had to pass the spectral quality filter with a sequence tag length >2 (i.e., minimum of 3 masses separated by the in-chain mass of an amino acid). A minimum backbone cleavage score was set to 5, and the “ESI QExactive HLA v2” scoring scheme was used. All spectra were searched using a no-enzyme specificity, a fixed modification of cysteine carbamidomethylation (Camc) and the following variable modifications: oxidized methionine (in), pyroglutamic acid, and cysteinylation (Ccys). Precursor and product mass tolerances were set at 0.1 Da and 10 ppm, respectively, and the minimum matched peak intensity was set at 30%. Peptide spectrum matches (PSMs) for individual spectra were automatically designated as confidently assigned using the Spectrum Mill autovalidation module to apply target-decoy based FDR estimation at the PSM rank to set scoring threshold criteria. An auto thresholds strategy using a minimum sequence length of 7, automatic variable range precursor mass filtering, and score and delta Rank1-Rank2 score thresholds were optimized across all nLC-MS/MS runs for an HLA allele yielding a PSM FDR estimate of <1% for each precursor charge state.

### Equation

[0758] The experimental monoisotopic molecular weight (MW) of each peptide epitope was calculated according to the following equation where m/z is the mass-to-charge ratio of the peptide epitope detected by the mass spectrometer, z is the charge of the peptide epitope, and 1.007276 is the monoisotopic molecular weight of a proton.

Experimental MW=((m/z)×(z))−((z)×(1.007276)) Equation 8.

### Results

[0759] Targeted nLC-MS/MS was used to validate the endogenous processing of peptide epitopes derived from the GATA3 neoORF that were predicted to bind to HLA-A*02:01, HLA-B*07:02, and HLA-B*08:01. Five peptide epitopes derived from the common region of the GATA3 neoORF were detected in HEK293T cells across the three alleles (FIG. 23).

[0760] For the HLA-A*02:01 heterodimer, four peptides derived from the common region of the GATA3 neoORF were targeted by nLC-MS/MS. Two peptides from the common region, SMLTGPPARV and MLTGPPARV, were successfully identified by database search and by spectral match to their synthetic peptide counterparts. The theoretical and experimental monoisotopic molecular weights for each peptide epitope with associated mass error are shown in Table 24. Backbone cleavage score and scored peak intensity as reported by the Spectrum Mill database search workflow are listed in Table 25. Backbone cleavage score is indicative of the number of fragment-specific ions generated by HCD whereas scored peak intensity shows the percentage of ion current in the MS/MS spectrum that is explained by the search interpretation.

Table 24 Below Lists Theoretical and Experimental Molecular Weights with Mass Error

| | | | Experi- | |
|---|---|---|---|---|
| | | Theoretical | mental | Mass |
| | | MW | MW | Error |
| Allele | Sequence* | (Da) | (Da) | (Da) |
| HLA-A*02:01 | SMLTGPPARV | 1027.5484 | 1027.5570 | 0.0086 |
| HLA-A*02:01 | MLTGPPARV | 940.5164 | 940.5126 | -0.0038 |
| HLA-B*07:02 | KPKRDGYMF | 1140.5750 | 1140.5748 | -0.0002 |
| HLA-B*07:02 | KPKRDGYMFL | 1253.6590 | 1253.6514 | -0.0076 |
| HLA-B*08:01 | ESKImFATL | 1054.5368 | 1054.5370 | 0.0002 |

*Lowercase m indicates oxidation of methionine.

Table 25 Shows Interpretation Metrics from Database Search

| | Sequence | | |
|---|---|---|---|
| | Coverage Map* | | Scored |
| | Key: / y-ion, | Backbone | Peak |
| | \ b-ion, | Cleavage | Intensity |
| Allele | \| b- & y-ions | Score | (%) |
| HLA-A*02:01 | S M\|L\|T/G/P/P A R V | 5/9 | 78.5 |
| HLA-A*02:01 | M/L\|T/G/P/P A R V | 5/8 | 83.6 |
| HLA-B*07:02 | K/P\|K/R D G Y\|M\|F | 5/8 | 81.1 |
| HLA-B*07:02 | K/P/K R D G Y\M\|F\L | 5/9 | 72.2 |
| HLA-B*08:01 | E S K\I m\F\A/T/L | 5/8 | 73.9 |

*Lowercase m indicates oxidation of methionine.

[0761] Each MS/MS spectrum acquired on the endogenously processed peptide epitope was matched to an MS/MS spectrum generated using the corresponding synthetic peptide. FIG. 24 shows the spectral comparison of the MS/MS spectrum for endogenously processed peptide epitope SMLTGPPARV (FIG. 24A bottom) and the MS/MS spectrum of its corresponding synthetic peptide (FIG. 24A top). FIG. 24B shows an alternative representation of the identical spectral match. These head-to-toe plots were generated using the top or 50 most abundant ions for 9mer and 10mer peptide epitopes, respectively (http://orgmassspec.github.io/).

[0762] FIG. 25 shows the MS/MS spectral comparison for HLA-A*02:01 endogenously processed peptide MLTGPPARV.

[0763] For HLA-B*07:02, five peptide epitopes derived from the common region of the GATA3 neoORF were targeted by nLC-MS/MS. Two peptide epitopes from the common region, KPKRDGYMF and KPKRDGYMFL, were successfully identified by database search and by spectral match to their corresponding synthetic peptides. The theoretical and experimental molecular weights for each peptide epitope with associated mass error are shown in Table 24. Backbone cleavage score and scored peak intensity as reported by the search engine are listed in Table 25.

[0764] FIG. 26 and FIG. 27 show the spectral comparison for HLA-B*07:02 peptide epitopes KPKRDGYMF and KPKRDGYMFL, respectively.

[0765] For HLA-B*08:01, eight peptide epitopes derived from the common region of the GATA3 neoORF were targeted by nLC-MS/MS. One peptide epitope from the common region, ESKIMFATL, was successfully identified by database search and by spectral match to the corresponding synthetic peptide. This peptide was detected with the sulfoxide form of methionine that resulted in a mass shift of 15.999 Da indicative of the addition of oxygen to the side chain. Oxidation of methionine (indicated as lowercase m) to its sulfoxide form is a common result of sample processing. The theoretical and experimental molecular weight for ESKImFATL with associated mass error is shown in Table 24. Backbone cleavage score and scored peak intensity as reported by the search engine are listed in Table 25.

[0766] FIG. 28 shows the spectral comparison for HLA-B*08:01 peptide epitope ESKImFATL.

[0767] Targeted nLC-MS/MS was used to validate the processing and presentation of five peptide epitopes derived from the common region of the GATA3 neoORF that were predicted to bind to HLA-A*02:01, HLA-B*07:02, and HLA-B*08:01 heterodimers. Class I HLA heterodimers were purified from HEK293T cells stably expressing the GATA3 neoORF using an affinity-tag that was genetically expressed on the alpha chain of each class I HLA heterodimer. Each affinity-tagged heterodimer (BAP-tagged HLA allele) was transiently transfected into GATA3 neoORF expressing HEK293T cells as described in RP19-005. The correct linear sequence for each targeted peptide epitope was confirmed by nLC-MS/MS peptide sequencing. All MS/MS spectra were interpreted with the Spectrum Mill database search workflow that matched experimental MS/MS spectra against peptides from a database comprised of >63,000 entries including the full length GATA3 neoORF. The molecular weight for each observed peptide epitope was calculated within +/−0.01 Da of its theoretical molecular weight. Interpretation of the experimental MS/MS spectra showed >72% of the ion current in the MS/MS spectra could be explained by the sequence-specific fragment ions. Additional confirmation of the endogenously processed peptide epitope sequence was performed by spectral matching to the MS/MS spectrum of the corresponding synthetic peptide that showed identical fragment ion masses and backbone cleavage patterns. Together, targeted nLC-MS/MS confirmed that the HLA-A*02:01 peptide epitopes SMLTGPPARV and MLTGPPARV, the HLA-1*07:02 peptide epitopes KPKRDGYMF and KPKRDGYMFL, and the HLA-1*08:01 peptide epitope ESKIMFATL were endogenously processed in HEK293T cells and subsequently bound by HLA heterodimers.

### Example 23 Immunogenicity on MHC I

[0768] This Example evaluates the immunogenicity of the GATA3 neoORF on various, high prevalent HLA alleles. The GATA3 neoORF is a frame shift mutation occurring before the natural stop codon resulting in an extension of the protein by at least 61 novel amino acids. Immunogenicity was evaluated by an in vitro induction of healthy donor (HD) PBMCs against predicted minimal epitopes specific for HLA-A02:01, A03:01, A24:02, B07:02, or B08:01.

### Materials and Methods

| Peptide | | Peptide | Final | Experimental | HLA |
|---|---|---|---|---|---|
| Pool | Sequence | Length | Purity | MW | Allele |
| A02.01 | SMLTGPPARV | 10 | 100% | 1028.1 | A02.01 |
| | YMFLKAESKI | 10 | 100% | 1229.4 | B08.01/A02.01/ |
| | | | | | A24.02 |
| | VLPEPHLAL | 9 | 100% | 988.4 | A02.01 |
| | TLQRSSLWCL | 10 | 98% | 1206.5 | A02.01 |
| | MLTGPPARV | 9 | 100% | 941.3 | A02.01 |
| A03.01 | YMFLKAESK | 9 | 80% | 1116.2 | A03.01 |
| | KIMFATLQR | 9 | 71% | 1107.3 | A03.01 |
| | VLWTTPPLQH | 10 | 85% | 1191.3 | A03.01 |
| A24.02 | YMFLKAESKI | 10 | 85% | 1229.4 | B08.01/A02.01/ |
| | | | | | A24.02 |
| | MFLKAESKI | 9 | 86% | 1066.3 | A24.02 |
| | YMFLKAESK | 9 | 80% | 1116.2 | A03.01/A24.02 |
| | KIMFATLQR | 9 | 71% | 1107.3 | A03.01/A24.02 |
| | VLWTTPPLQH | 10 | 85% | 1191.3 | A03.01/A24.02 |
| B07.02 | KPKRDGYMFL | 10 | 71% | 1254.3 | B07.02 |
| | FATLQRSSL | 9 | 83% | 1022.2 | B08.01/B07.02 |
| | EPHLALQPL | 9 | 81% | 1017.2 | B08.01/B07.02 |
| | KPKRDGYMF | 9 | 73% | 1141.2 | B07.02 |
| | GPPARVPAV | 9 | 81% | 863.0 | B07.02 |
| B08.01-1 | FATLQRSSL | 9 | 83% | 1022.2 | B08.01/A24.02 |
| | ESKIMFATL | 9 | 76% | 1039.2 | B08.01/B07.02 |
| | FLKAESKIM | 9 | 78% | 1066.2 | B08.01/B07.02 |
| | EPHLALQPL | 9 | 81% | 1017.2 | B08.01 |
| B08.01-2 | YMFLKAESKI | 10 | 85% | 1229.4 | B08.01/A02.01/ |
| | | | | | A24.02 |
| | MFATLQRSSL | 10 | 80% | 1153.2 | B08.01/B07.02 |
| | IMKPKRDGYM | 10 | 74% | 1238.4 | B08.01 |
| | FLKAESKIMF | 10 | 71% | 1213.3 | B08.01 |

Table 27 lists healthy donor information

| Healthy | Class I Type | | | | | |
|---|---|---|---|---|---|---|
| Donor ID | HLA-A | | HLA-B | | HLA-C | |
| HD44 | 11:01:01 | 24:02:01 | 13:01:01 | 40:01:02 | 03:04:01 | N/A |
| HD45 | 03:01 | 68:01:02 | 39:01:01 | 51:08:01 | 07:02:01 | 16:02:01 |
| HD48 | 02:06:01 | 29:02:01 | 07:02:01 | 48:01:01 | 07:02:01 | 08:03:01 |
| HD50 | 02:01:01 | 68:03:01 | 35:01:01 | 51:01:01 | 07:02:01 | 16:02:01 |
| HD56 | 01:01:01 | 68:01:02 | 08:01:01 | 40:08 | 03:04:01 | 07:01:01 |

N/A = The donor is homozygous for the particular allele. The epitope targeted alleles are in bold

### Induction Using FMS-Like Tyrosine Kinase 3 Ligand (FLT3L) to Stimulate DCs

[0770] FLT3L Stimulation was performed by the following method. PBMCs were thawed and resuspended at 5×10\hat{ }7 cells/mL in AIM-V Media. Benzonase (Sigma-Aldrich 70746) was added at 25-29U/μL and incubated at 37 C for 30 min-1 hr. A CD14/CD25 depletion was performed to remove Monocytes (CD14) and T regulatory cells (CD25) according to the manufacturer's protocol (Miltenyi Biotec, Inc 130-050-201, 130-092-983). Cells at 2×10\hat{ }6 cells/mL were resuspended in AIM-V media with FLT3L (CellGenix 1415-050) at 50 ng/mL and plated 2 mL per well in a 24-well plate overnight. Peptide diluted in AIM-V was added at a final concentration of 2 uM and the wells were mixed gently. The cells were incubated with the peptide for 1 hour at 37° C.

[0771] Maturation cocktail with Tumor Necrosis Factor a (TNF-a) (1000U/mL) (CellGenix1406-050), IL-1b (10 ng/mL) (CellGenix1411-050), Prostaglandin-E 1 (PGE-1) (0.5 μg/mL), and IL-7 (0.5 ng/mL) was added and incubated at 37 C overnight. After the overnight maturation cocktail incubation, FBS was added to each well at a final concentration of 10% by volume and mixed. The co-culture was fed every 2-3 days starting at day 5 by carefully replacing 75% of the media with fresh Roswell Park Memorial Institute 1640 (RPMI)+10% FBS with enough IL-7 and IL-15 for a final concentration of 5 ng/mL in the well. For feeds after the first one, the media was replaced with fresh 20/80+10% FBS with enough IL-7 and IL-15 for a final concentration of 5 ng/mL in the well. Begin mDC Generation was begin on day 4.

Mature Dendritic Cell (mDC) Generation

[0772] PBMCs were thawed and resuspended at 5×10\hat{ }7 cells/mL in Dendritic Cell (DC) Media (Cellgenix 20801-0500). Benzonase was added (sigma-aldrich 70746) at 25-29U/uL and incubated at 37° C. for 30 min-1 hr.

[0773] A Pan Monocyte Isolation was performed according to the manufacturer's protocol (Miltenyi biotec, Inc 130-096-537). Cells were plated in 6-well plates at 3×10\hat{ }6 cells/well in 2 mL DC media with Granulocyte-macrophage colony-stimulating factor (GM-CSF) (800 U/mL) (CellGenix 1412-050) and IL-4 (400 U/mL) (CellGenix 1403-050) and incubated at 37° C. for 5 days.

[0774] Peptide loading and maturation was performed in the following manner. The immDCs from the wells were collected by pipetting and pellet by centrifuging at 1200 RPM for 5 minutes. The cells were resuspended at 1 mL in DC media. The cells were separated into pools with 0.2×10\hat{ }6 (or 0.5×10\hat{ }6) cells per well for each pool and incubate for 1 hr at 37 C with 1.6 uM of peptide (0.4 uM final concentration). 800 uL (or 2 mL) of DC media was added with per well to the peptide loaded immDCs and plated in a 6 well plate with the following cytokines and incubated at 37° C. for 2 days: IL-4 (400 U/mL) (CellGenix 1403-050), GM-CSF (800 U/mL) (CellGenix 1412-050), TNF-α (10 ng/mL) (CellGenix1406-050), IL-1b (10 ng/mL) (CellGenix1411-050), PGE-1 (0.5 μg/mL) (Cayman from Czech republic), IL-6 (10 ng/mL) (CellGenix 1004-50).

### Mature Dendritic Cell Mediated Long Term Stimulation (mDC LTS)

[0775] On day 12 FLT3L stimulated T Cells were added. The DCs were resuspended in 1 mL 20/80. The coculture wells were harvested and counted and cells were resuspended at 5×10\hat{ }6/mL in 20/80. 1 mL of naïve T cells were added to the mDCs at a ratio of 10:1 (T cells: mDC) with cytokines IL-7 (5 ng/mL) IL-15 (5 ng/mL). Media to a final volume of 5 mL per well was added. The coculture was incubated at 37° C. The co-culture was fed every 2-3 days starting at day 15. Cells were expanded into larger volume flasks as need.

Media to add(mL)=(current vol(mL)×(180−Glucose))/60 Equation 9.

[0776] The cultures were restimulated on day 23 on new mDCs. The DCs were resuspended in 1 mL 20/80. The coculture wells were harvested and cells resuspended at 2e6/mL (or 5e6/mL) in 20/80. 1 mL of naïve T cells were added to the mDCs at a ratio of 10:1 (T cells: mDC) with cytokines IL-7 (5 ng/mL) IL-15 (5 ng/mL). Media was added to a final volume of 5 mL per well. The coculture was incubated at 37° C. The co-culture was fed every 2-3 days. Cells were expanded into larger volume flasks as needed.

Media to add(mL)=(current vol(mL)×(180−Glucose))/60 Equation 9:

[0777] On day 31 the cells were frozen in 1 mL freeze media (90% FBS, 10% DMSO). Cells were kept overnight at −80° C. in a CoolCell Freeze Container (VWR 75779-816) before transferring them to the liquid nitrogen for long term storage.

### Multimer Generation and Analysis

### Peptide Exchange Monomers

[0778] HLA MHC Class I monomers loaded with a UV cleavable peptide were generated internally. The monomers were resuspended at 100 ug/mL in filtered PBS and the assay peptides resuspended at 10 mg/mL in DMSO and the UV cleavable peptide were exchanged with individual assay peptides at a ratio of 1 uL peptide: 50 uL monomer under a UV light for 1 hr at 4° C. Exchanged monomers were spun down at 3600 RPM and the supernatant collected.

### Fluorochrome Conjugation

[0779] 50 uL pMHC was combined with the streptavidin-labeled fluorochrome on ice for 30 min in the dark according to each of the following fluorochrome's conjugation ratio (CR): PE (BioLegend 405203) (CR: 2); APC (BioLegend 405207) (CR: 3); BV421 (BioLegend 405226) (CR: 2); QD605 (Life Technologies Q10101 MP) (CR: 2); QD705 (Life Technologies Q10161 MP) (CR: 2); BUV395 (BD 564176) (CR: 2); BV650 (BD 563855) (CR: 2). Each pMHC was spilt and conjugated to two individual fluorochromes. Biotin was added (Avidity BIO200)+0.5% azide at a 1:20 ratio and multimers stored at 4° C. in the dark for between 1 and 3 days. Flow cytometry readout obtained on days 11, 22, and post freeze. ˜2×10\hat{ }6 cells were collected in a polypropylene V-bottom 96 well plate in media with Benzonase (sigma-aldrich 70746) at 25-29U/uL and incubate at 37 C for 30 min-1 hr.

[0780] Cells were stained with all the following fluorochrome conjugated multimers loaded with the induced peptides in 50 uL filtered Phosphate Buffered Saline (PBS) for 15 min at 37° C. in the dark. PE (BioLegend 405203) 1 uL; APC (BioLegend 405207) 3 uL; BV421 (BioLegend 405226) 1 uL; QD605 (Life Technologies Q10101 MP) 4.5 uL; QD705 (Life Technologies Q10161 MP) 4.5 uL; BUV395 (BD 564176) 3.5 uL; BV650 (BD 563855) 2.5 uL. The samples were stained with the following surface antibodies for 30 min on ice in the dark. Analyzed on the LSR-Fortessa for Cluster of differentiation (CD)8(+)/CD4(−)/CD14(−)/CD16(−)/CD19(−)/Dead(−)/Multimer_1(+)/Multimer_2 (+)/Irrelevant Multimer(−): CD8-FITC (Biolegend 344704) 2 uL, CD4-AF700 (BD 557922) 1 uL, CD14-AF700 (BD 557923) 1 uL, CD19-AFF700 (BD 557921) 1 uL, CD16-AF700 (BD 557920) 1 uL, Live dead stain (Molecular probes L-23101) 0.1 uL.

### Results

[0781] Each sample was stained with two multimers for every peptide the donor was induced against in a unique fluorochrome combination. Positive inductions were determined by at least 10 events positive for at least 1 specific fluorochrome combination and negative for irrelevant fluorochrome combinations. Data was collected after each stimulation and a positive result across two stimulations was considered a positive induction. FIG. 29A and FIG. 29B show representative induction of GATA3 Neoantigen CD8+ Responses.

### Table 28 Shows Percentage of Positive GATA3 Neoantigen CD8+ Responses

| | | Number | | |
|---|---|---|---|---|
| | | of wells | Number | |
| | | with a | of | Percent |
| Inducing | | reactive | wells | positive |
| Peptide | Allele | TCR | tested | inductions |
| MLTGPPARV | A02:01 | 5 | 5 | 100% |
| SMLTGPPARV | A02:01 | 1 | 5 | 20% |
| GPPARVPAV | B07:02 | 1 | 5 | 20% |
| KPKRDGYMF | B07:02 | 1 | 5 | 20% |
| ESKIMFATL | B08:01 | 1 | 5 | 20% |

Table 28 reports the percentage of replicates that resulted in a naïve CD8+ T cell induction confirmed over two independent stimulations.

[0783] These results show that there is at least one minimal epitope within the GATA3 neoORF that can generate a CD8+ specific induction in vitro to 4 out of the 5 assayed HLAs. The results indicate broad immunogenicity of the GATA3 neoORF across all HLAs and identify immunogenic minimal neoantigen epitopes specific to the high prevalent HLAs.

### Example 24 Immunogenicity on MHC II

[0784] This Example evaluates the CD4 immunogenicity of longmer peptides (>15 amino acids) specific to the GATA3neoORF. To predict in vivo CD4 immunogenicity an in vitro induction assay was used against five different healthy donors with minimal HLA-Class II overlap.

### Materials and Methods

### Table 29 Below Lists Inducing Peptides

| Peptide | | Peptide | Final | Molecular |
|---|---|---|---|---|
| Pool | Sequence | Length | Purity | Weight |
| L1 | PGRPLQTHVLPEPHLALQPLQPHADHA | 27 | 95% | 2971.2 |
| | APAIQPVLWTTPPLQHGHRHGLEPCS | 26 | 90% | 2843.4 |
| | PPARVPAVPFDLHFCRSSIMKPKRD | 25 | 93% | 2865.8 |
| L2 | EPHLALQPLQPHADHAHADAPAIQPV | 26 | 92% | 2774.2 |
| | TPPLQHGHRHGLEPCSMLTGPPARVPA | 27 | 96% | 2857.8 |
| | DLHFCRSSIMKPKRDGYMFLKAESK | 25 | 88% | 2989.0 |
| | KAESKIMFATLQRSSLWCLCSNH | 24 | 100% | 1810.0 |
| L3 | HADHAHADAPAIQPVLWTTPPLQH | 24 | 94% | 2624.1 |
| | EPCSMLTGPPARVPAVPFDLHFCR | 24 | 98% | 2641.4 |
| | KPKRDGYMFLKAESKIMFATLQRS | 24 | 98% | 2846.8 |

### Table 30 Below Provided Healthy Donor Information

| | | Healthy Donor ID | | | | |
|---|---|---|---|---|---|---|
| | | HD41 | HD44 | HD63 | HD47 | HD56 |
| Class II Allele | HLA-DPA1 | 01:03:01 | 02:02:02 | 01:03:01 | 01:03:01 | 01:03:01 |
| | | 01:04:01 | 02:02:02 | 01:03:01 | 01:03:01 | 02:01:02 |
| | HLA-DPB1 | 05:01:01 | 05:01:01 | 04:01:01 | 04:01:01 | 01:01:01 |
| | | 107:01 | 05:01:01 | 04:01:01 | 15:01:01 | 04:02:01 |
| | HLA-DQA1 | 03:03:01 | 01:02:02 | 02:01:01 | 05:01:01 | 03:01:01 |
| | | 01:03:01 | 05:08 | 04:01:01 | 05:05:01 | 05:01:01 |
| | HLA-DQB1 | 01:03:01 | 03:01:01 | 02:02:01 | 02:01:01 | 02:01:01 |
| | | 01:03:01 | 05:02:01 | 04:02:01 | 03:01:01 | 03:02:01 |
| | HLA-DRB1 | 04:05:01 | 12:01:01 | 07:01:01 | 03:01:01 | 03:01:01 |
| | | 11:01:01 | 16:02:01 | 08:02:01 | 11:02:01 | 04:04:01 |
| | HLA-DRB345 | 02:02:01 | 01:01:02 | 01:01:01 | 02:02:01 | 01:01:02 |
| | | 01:03:01 | 01:01:01 | Not Present | 02:02:01 | 01:03:01 |

Mature Dendritic Cell (mDC) Generation

### Monocyte Isolation

[0787] PBMCs were thawed and resuspended at 5×10\hat{ }7 cells/mL in Dendritic Cell (DC) Media (Cellgenix 20801-0500). Benzonase was added (sigma-aldrich 70746) at 25-29U/uL and incubated at 37° C. for 30 min-1 hr. A Pan Monocyte Isolation was performed according to the manufacturer's protocol (Miltenyi biotec, Inc 130-096-537). The cells were plated in 6-well plates at 3×10\hat{ }6 cells/well in 2 mL DC media with GM-CSF (800 U/mL) and IL-4 (400 U/mL) and incubate at 37° C. for 5 days.

### Peptide Loading and Maturation

[0788] The immDCs were collected from the wells by pipetting and pelleted by centrifuging at 1200 RPM for 5 minutes. The cells were resuspended at 1 mL in DC media. The cells were separated into pools with 0.2×10\hat{ }6 (or 0.5×10\hat{ }6) cells per well for each pool and incubate for 1 hr at 37° C. with 1.6 uM of peptide (0.4 uM final concentration). 800 uL (or 2 mL) of DC media was added with per well to the peptide loaded immDCs and plated in a 24 (or 6) well plate with the following cytokines and incubated at 37° C. for 2 days; IL-4 (400 U/mL) (CellGenix 1403-050), GM-CSF (800 U/mL) (CellGenix 1412-050), TNF-α (10 ng/mL) (CellGenix1406-050), IL-1b (10 ng/mL) (CellGenix 1411-050), PGE-1 (0.5 μg/mL) (Cayman from Czech republic), IL-6 (10 ng/mL) (CellGenix 1004-50)

### Long Term Stimulation (LTS)

[0789] Naïve T Cells were added. PBMCs were thawed and resuspended at 5×10\hat{ }7 cells/mL in DC Media (Cellgenix 20801-0500). Benzonase was added (sigma-aldrich 70746) at 25-29U/uL and incubate at 37° C. for 30 min-1 hr.

[0790] A CD14/CD25 depletion was performed to remove Monocytes (CD14) and T regulatory cells (CD25) according to the manufacturer's protocol (Miltenyi Biotec, Inc 130-050-201, 130-092-983). 1 mL of naïve T cells were added to the mDCs at a ratio of 10:1 (T cells: mDC) with cytokines IL-7 (5 ng/mL; CellGenix) IL-15 (5 ng/mL; CellGenix). The coculture was incubated at 37° C. The mDCs were either resuspended in 20/80 or kept in the DC media with cytokines.

[0791] The co-culture was fed every 2-3 days starting at day 5 following either method 1 or method 2 below (2.3.2.1.1 or 2.3.2.1.2). Cells were expanded into larger volume flasks as need. For method 1,

[0792] media to add was calculated as (mL)=(current vol(mL)×(180−Glucose))/60. For method 2, glucose meter was used to check if the media is yellow. If glucose remains high (>90 mg/dL), 100 uL of 20×IL-7 and IL-15 was added to the well. If glucose is low (<90 mg/dL), the cells were expanded to 6 well plate (4 mL/well) and supplemented with 1×IL-15 and IL-7. If glucose is very low (<60 mg/dL), expanded to 6 mL/well in a 6-well plate. On days 6 and 13 or 14 new mDCs were generated

[0793] On days 13 and 21 or 22 the cultures on new mDCs were restimulated. The coculture wells were harvested and counted and resuspended cells at 2×10\hat{ }6/mL (or 5×10\hat{ }6/mL) in 20/80. 1 mL of naïve T cells were added to the mDCs at a ratio of 10:1 (T cells: mDC) with cytokines IL-7 (5 ng/mL) IL-15 (5 ng/mL). The coculture was incubated at 37° C. The mDCs were either resuspended in 20/80 or kept in the DC media with cytokines. On day 28 or 29 the cells were frozen in 1 mL freeze media (90% FBS, 10% DMSO). The cells were kept overnight at −80 C in a CoolCell Freeze Container (VWR 75779-816) before transferring them to the liquid nitrogen for long term storage.

### CD4 Recall Assay

[0794] Either new mDCs were generated or fresh PBMCs were thawed from the same induction donor. Plate the cells at 0.26/well of PBMCs and 0.02×10\hat{ }6/well of mDCs in a 96-well u-bottom plate with peptide or DMSO at 0.8 uM final concentration. Induction sample was added at a 1:1 induction: PBMC or 10:1 induction: mDC ratio to the wells and incubate at 32 C for 20-24 hours

### Flow Cytometry Readout

[0795] Golgi stop (BD 554724) and golgi plug (BD 555029) was added to the cultures according to the manufacture's protocol and incubate for 4 hours. Cells were stained with CD4-BV786 (BD 563877), CD8-AF700 (BD 561453), CD14-FITC (BD 340682), CD16-FITC (BD 340704), CD19-FITC (BD 340864), Live dead stain (Molecular probes L-23101) for 20 minutes. The samples were fixed using Fixation/Permeabilization kit (BD 554714) according to the manufacture's protocol. The cells were stained with IFN-γ-PE (Biolegend 502508) for 20 minutes. Analysis was done on the LSR-Fortessa for CD4 (+)/CD8 (−)/CD14 (−)/CD16 (−)/CD19 (−), Dead (−)/IFNγ (+).

### Results

[0796] Using flow cytometry, antigen specific, CD4 T cells were identified (FIG. 30A and FIG. 30B). At least one induction to a GATA3 neoORF specific peptide in every healthy donor tested was identified.

[0797] Specific reactive peptides were identified by recalling the induced cells against individual peptides and comparing to a recall without peptide. Each induction sample was run initially against the inducing pools and the positive samples were subsequently recalled against individual peptides. All samples were run on duplicate plates and if the average CD4+/IFNy+ percentage of the induction samples with peptide was greater than 2% compared to the same sample without peptide the sample was considered a hit.

### Table 31 Shows Percentage of GATA3 Neoantigen CD4 Responses

| Inducing Peptide | HD41 | HD44 | HD56 | HD47 | HD63 |
|---|---|---|---|---|---|
| EPHLALQPLQPHADHAHADAPAIQPV | 0% | 20% | 0% | 0% | 0% |
| APAIQPVLWTTPPLQHGHRHGLEPCS | 0% | 0% | 0% | 20% | 0% |
| PPARVPAVPFDLHFCRSSIMKPKRD | 0% | 20% | 20% | 0% | 0% |
| DLHFCRSSIMKPKRDGYMFLKAESK | 40% | 0% | 20% | 40% | 20% |
| KPKRDGYMFLKAESKIMFATLQRS | 0% | 40% | 0% | 0% | 0% |
| LKAESKIMFATLQRSSLWCLCSNH | 20% | 0% | 0% | 0% | 0% |

Sequences in bold are in the region of the GATA3 NeoOrf common to all patients

[0799] At least one CD4 specific response was observed to the common region of the GATA3 neoORF in all healthy donors tested. These donors had a wide range of MHC Class II HLA alleles, indicating that the ability to generate a CD4 GATA3 response is not allelic dependent.

### Example 25 Functional Assays with Induced CD8+ T Cells

[0800] This Example shows the ability of CD8+ T cells specific for neoantigens derived from the GATA Binding Protein 3 (GATA3) novel open reading frame (neoORF) to kill cells harboring the appropriate GATA3 neoORF mutation. The induction of the neoantigen specific CD8+ T cells is described previously in Example 23 and the generation of the cell line harboring the GATA3 neoORF mutation is described in Example 21.

[0801] In this Example, CD8+ T cells specific for a single epitope from the GATA3 neoORF presented on HLA-A02:01 (covered by peptide sequence MLTGPPARV) were selected for this detailed analysis. Briefly, the induced CD8+ T cells were co-cultured with target cells either transduced with the GATA3 neoORF or unmanipulated as a negative control. After co-culture, the target cells were evaluated for their expression of Caspase 3, a marker of cell death, as a measure of cytotoxicity by the induced CD8+ T cells. Increased Caspase 3 on the target cells expressing the GATA3 neoORF relative to unmanipulated cells represents specific killing due to the cognate epitope being presented on the surface of the target cells. In addition, the CD8+ T cells were evaluated for the expression of CD107a, a T cell activation marker, to measure antigen specific T cell activation. To further evaluate antigen specific recognition of GATA3 induced PBMC, IFN-γ, a cytokine produced by CD8+ cytotoxic T cell upon antigen recognition, was also measured in the supernatant.

[0802] In total, four different CD8+ T cell populations specific for a GATA3 neoORF epitope on HLA-A02:01 were tested for their ability to kill target cells harboring the mutation. In all four cases, increased Caspase 3 was observed on the target cells harboring the GATA3 neoORF relative to target cells without the mutation. The increase in Caspase 3 demonstrates ability of CD8+ T cells specific for epitopes from GATA3 neoORF to kill cells harboring the GATA3 neoORF mutation.

### Materials and Methods

### Cytotoxicity Assay

[0803] HEK 293T cell lines were purchased from the American Type Culture Collection (Rockford, Md., USA) and maintained in DMEM, 10% FBS, and Pen/Strep medium. GATA3 gene encoded lentivirus was generated and transduced to HEK 293T cells. The GATA3 transduced HEK 293T cells were maintained under 1 μg/mL of puromycin in complete media for more than 2 weeks. Further details are described in Example 21.

[0804] 1×10⁷ target cells in 1 mL were added to 1 μL of Tag-it Violet (Biolegend) followed by incubation in 5% CO₂ incubator for 20 minutes, washing 5 mL of culture media with 10% FBS twice, and resuspending cells in at 1×10⁶ cells of culture media.

[0805] The induced PBMC vials were thawed by placing in 37° C. water bath. Then 1 mL of FBS was added to each vial. The cells were transferred to 50 mL conical tube containing 15 ml culture media of AIM-V, 10% FBS, and Pen/Strep medium. The cells were centrifuged at 1500 rpm for 5 min and resuspended in 5 mL of culture media. The cells were rested for 1 hour and 30 min in 37° C., 5% CO₂ incubator before adding 5 μL of Benzonase (Millipore Sigma) and further incubating for 30 min in 37° C., 5% CO₂ incubator. The incubated cells were centrifuged again, and after removing supernatant were resuspended in 5 mL of AIM-V media. The cell number was counted using Vi-CELL counter (Beckman coulter).

[0806] The cells were centrifuged and resuspended in the 40 μL of MACS buffer per 1×10⁷ target cells. CD8+ positive cells were negatively enriched according to human CD8+ T cell isolation kit (Miltenyi Biotec). The CD8+ cells were resuspended at 2.5×10⁶ cells in 1 mL of AIM-V media. 5×10⁴ of target cells per well were seeded in 50 μL of culture media on 96 well flat bottom plate and cultured for overnight in 37° C., 5% CO₂ incubator. GATA3 induced and CD8+ enriched cells were seeded over the target cells at 2.5×10⁵ cells per well in 100 μL of AIM-V media. The co-culture cells were incubated for 6 hours in 37° C., 5% CO₂ incubator.

[0807] The culture supernatants of co-culture were harvested and assessed IFN-γ concentration with V-PLEX Human IFN-γ assays according to manufacturer's protocol (Meso Scale Discovery).

[0808] The suspension cells were transferred to a new staining plate and the adherent cells were transferred after adding 50 μL of trypsin per well, incubation at 37° C. and resuspending with AIM V media. The cells were combined, centrifuged and washed with FACS buffer. 50 μL of antibody mixture (anti-CD3-BUV8052, anti-CD4-BV711, anti-CD107a-BV786, anti-CD8+-PE-cy5, and IR dye Live/Dead; BD) were added to each sample following by incubation for 30 min on ice. The cells were washed with 100 μL of FACS buffer. Caspase-3 intra cellular staining was performed according to manufacture manual of Cytofix/Cytoperm kit (BD) with 2 μL of Caspase-3 antibody. The stained cells were analyzed by Fortessa II (BD).

### Results

### Cytotoxicity Assay by GATA3 Induced PBMC

[0809] Three different healthy donor PBMCs (HD47, HD50 and HD51) were induced with the GATA3 HLA-A:02 neoantigen peptide MLTGPPARV by long term stimulation method. This epitope:allele combination was determined optimal for testing in cytotoxicity assay as compared to other epitope:alleles related to GATA3 neoORF considering allele frequency and cell counts. FIGS. 31A-31D show GATA3 specific CD8+ T cells by multimer staining. These T cells were selected as effector cells for cytotoxicity assay.

[0810] GATA3 transduced HEK293T cells were used as target cell (Example 21). Also, non-transduced HEK 293T cells were used for negative control. After 6 hours co-culture of effector cells and target cells, averages of 3.3%, 3.7%, 2.5% and 2.8% of Caspase-3 positive cells were found for the 4 experiments in non-transduced target cells, and averages of 4.4%, 5.2%, 6.3% and 6.9% of Caspase-3 positive cells were seen in GATA3 transduced cells, respectively (FIG. 32). Significantly higher Caspase-3 positive target cells were observed at co-culture with GATA3 induced PBMCs from HD51 (FIG. 33). The higher frequency of CD107a expressed CD8+ T cells were observed in GATA3 transduced HEK293T cells co-culture condition with 2 of GATA induced healthy donor PBMC (sample 1 and sample 2) (FIG. 34). Higher level of IFN-γ were detected in the same condition of co-culture with 2 of GATA induced healthy donor PBMC (sample 1 and sample 2) (FIG. 35).

[0811] An in vitro cytotoxicity assay was utilized to evaluate the ability of CD8+ T cells specific for the GATA3 neoORF to recognize and kill cells harboring the GATA3 frameshift mutation. PBMCs including T cells specific for GATA3 frameshift neoantigens on HLA-A02:01 derived from healthy donors stimulated with the GATA3 frameshift peptide MLTGPPARV were tested as representative of types of T cells that might be induced from a GATA3 frameshift vaccine. These T cells led to tumor cell death as confirmed by assaying the presence of target cell death marker, Caspase-3. Results from the CD8+ T cell activation marker CD107a and cytokine IFN-γ assays further suggest these peptide-induced T cells can recognize and kill cells that naturally process and present GATA3 frameshift neoantigens.

### Example 26 TCR Cloning and Functional Assays

[0812] The Example shows cloning of the T cell receptor (TCR) from a CD8+ T cell specific for a neoantigen from the GATA3 neoORF on HLA-A02:01 and functional assays. The induction of neoantigen-specific CD8+ T cells is described in Example 23. The specific CD8+ T cells were isolated using fluorescence-activated cell sorting (FACS) and the TCR sequence was identified using the 10× Genomics and MiSeq platforms. The selected TCR was then recombinantly expressed in a T cell line for both functional characterization of the TCR and evaluation of the processing and presentation of the neoantigen on the surface of a cell harboring the GATA3 neoORF mutation, the generation of which is described in Example 21.

[0813] The TCR was characterized to have an avidity below 40 nM. This demonstrates that it is possible to generate CD8+ T cells with TCRs to GATA3 neoantigens. Further, the TCR is able to recognize the processed and presented neoantigen on the surface of HEK293T cells harboring the GATA3 neoORF mutation, which supports the results in Example 22, demonstrating the processing and presentation of GATA3 neoantigens on the surface of cells harboring the mutation.

### Materials and Methods

[0814] FIGS. 36-38 shows an overview of TCR cloning and functional assay. GATA3 CD8+ T cell sorting by multimer

[0815] GATA3 neoORF specific T cells were induced and expanded (Example 23). The induced cells were stained with GATA3 9mer peptide multimer and surface antibodies (CD8, CD4, CD14, CD16, CD19 and a near-IR fluorescent reactive dye). GATA3 specific T cells, which were GATA3 multimer and CD8 positive, were sorted by FACS ARIA fusion (BD) and collected into 1.5 mL tube containing 2% FBS in PBS.

### Single T Cell TCR Sequencing by 10× Genomics and MiSeq

[0816] After sorting, the collected cells were immediately processed for single cell barcoding and generating cDNA with Chromium Single Cell V(D)J Reagent Kits (10× Genomics). TCR sequence enrichment and library construction were performed according to the manufacturer's protocol. The sequencing was performed at 10 μM scale with MiSeq 300 cycles reagent kit and MiSeq (Illumina). Analysis of TCR sequence and clonality were made employing Cell ranger software and Loupe VDJ browser (10× Genomics).

### TCR Gene Synthesis and Cloning

[0817] The selected TCR sequences were codon-optimized for mammalian system. The TCR DNA sequences were synthesized and cloned to lenti-virus vector (pCDH-EF1α-Puro, System Biosciences) by GENEWIZ (NJ, USA). The lenti-virus vector contained EF1α promotor followed by TCR beta, furin cleavage site, F2A, TCR alpha, T2A, and puromycin resistance site (FIG. 40)

### Lenti-Virus Production

[0818] To generate lenti-virus encoded GATA3 neoORF TCR gene, the lenti-virus vector, package plasmids and the fresh HEK 293T cells (ATCC) were used by transfection method. The transfection and harvest details are described in Example 21.

### Transduction to Jurkat Cells or PBMC

[0819] The modified Jurkat (J.RT3-T3.5, ATCC) cells, which lack the TCR beta, were modified to express the CD8+ alpha chain by lenti-virus encoding the CD8+ alpha gene. The modified Jurkat cells were used for transduction of GATA3 TCR lenti-virus. 1.8×10⁶ Jurkat cells were seeded in 1.2 mL of RPMI-1640 media with 10% FBS and 6 μg/mL of polybrene in 24 well plate. After 0.6 mL of GATA3 specific TCR lenti-virus was added to the cells, the plate was centrifuged at 2,400 rpm for 45 minutes at 32° C. The cells were incubated in 5% CO2 incubator for 24 hours. The transduced Jurkat cells were maintained in RPMI-1640 media with 10% FBS with 1 μg/mL of Puromycin for 10 days.

IL-2 Release Assay with Peptide Titration

[0820] To evaluate the sensitivity of the TCR that was cloned into the Jurkat cells, a peptide titration assay was performed. Jurkat cells secret IL-2 specifically in response to TCR signaling. Because the Jurkat cells employed in this assay lack an endogenous TCR beta, the TCR on the surface of these cells is specifically the cloned TCR. Peptides were added across a broad range of concentrations to HEK293T target cells with the relevant HLA (HLA-A02:01) but not the GATA3 mutation to evaluate the maximal IL-2 secretion, and to estimate the concentration of peptide required to release 50% of this maximal secretion (EC50). This EC50 is taken as the avidity of the TCR. 20,000 unmodified HEK 293T cells which endogenously express HLA:A02.01 were seeded on 96 well plate with addition of 100 μL GATA3 peptide or irrelevant peptide ranging from 20 μM to 2 μM concentration in DMEM with 10% FBS. After overnight incubation at 37° C., 200,000 GATA3 neoORF specific TCR transduced Jurkat cells were added into each well at a 10:1 ratio of TCR transduced Jurkat cells to peptide loaded HEK 293T cells. The co-culture was incubated in 5% CO2 incubator at 37° C. for 24 hours. 50 μl of supernatant from each well were harvested and the concentration of human IL-2 were measured by Meso scale discovery kit according to the manufacturer's protocol.

IL-2 Release Assay with GATA3 Mutation Transduced Target Cell

[0821] To evaluate the ability of the TCR to recognize a truly processed and presented neoantigen, a co-culture of TCR-transduced Jurkat cells and HEK 293T target cells. In this system, though, no peptides were exogenously added. Instead, cell lines transduced with either the GATA3 neoORF or an irrelevant gene were utilized as targets. In this way, for the TCR-transduced Jurkat cells to recognize its targets, the GATA3 neoantigen has to be processed and presented on the surface of the target cell.

[0822] 20,000 of GATA3 mutation or irrelevant gene transduced HEK 293T cells were seeded on 96 well plate. After overnight incubation, 200,000 of GATA3 specific TCR transduced Jurkat cells were added into each well. The co-culture was incubated in 5% CO2 incubator, 37° C. for 24 hours. 50 μl of supernatant from each well were harvested and the concentration of human IL-2 were measured by Meso scale discovery kit according to the manufacturer's protocol (Meso Scale Discovery).

### Results

### GATA3 Specific TCR Jurkat Cells

### GATA3 Specific CD8⁺ T Cell Sorting

[0823] 2.1% of GATA3 specific CD8+ T cells were detected in the well number 5 of healthy donor 42 by GATA3 HLA-A02 multimer after long term stimulation with GATA3 neoORF peptide MLTGPPARV. The multimer double positive 5,402 cells were sorted by FACSARIA (FIG. 39). The sorted cells were single cell barcoded with 10× Genomics V(D)J kit. The TCR alpha and beta paired sequences were analyzed with Loupe V(D)J browser. The dominant clonotype (clonotype1) has sequences CALDIYGNNRLAF and CASSLDFVLAGSYSYEQFF of CDR3 TCR alpha and beta amino acid sequences, respectively. Clonotype 2 has the same TCR beta sequence as clonotype1 without the sequence of TCR alpha. Clonotype 4 has same TCR alpha sequence as clonotype 1 without the sequence of TCR beta. The sum proportion of clonotype 1, 2 and 4 was 82.5% of all TCR clonotypes and other clonotypes were less than 1% (Table 32).

### Table 32 Below Shows Exemplary GATA3 Specific TCR Clonotype Analysis

| clonotype_id | frequency | proportion | CDR3 Amino acid sequence |
|---|---|---|---|
| clonotypel | 1178 | 48% | TRA:CALDIYGNNRLAF;TRB:CASSLDFVLAGSYSYNEQFF |
| clonotype2 | 848 | 34% | TRB:CASSLDFVLAGSYSYNEQFF |
| clonotype4 | 12 | 0.5% | TRA:CALDIYGNNRLAF |
| clonotype3 | 12 | 0.5% | TRA:CAEKVPNTGNQFYF;TRB:CASSSLGTVRTEAFF |
| clonotype5 | 10 | 0.4% | TRA:CAVEAYNFNKFYF;TRB:CASRSENTIYF |
| clonotype6 | 10 | 0.4% | TRA:CILSDSGNTPLVF;TRB:CASSDWAVSGNTIYF |
| clonotype7 | 9 | 0% | TRA:CAGAANAGGTSYGKLTF;TRB:CASSQAQGANYGYTF |
| clonotype9 | 7 | 0% | TRA:CAEIPTFSGGYNKLIF;TRB:CASSLAGQETQYF |
| clonotype8 | 7 | 0% | TRA:CLRGGSTLGRLYF;TRB:CASSLYPTGGSGMDEQYF |
| clonotype10 | 6 | 0% | TRA:CAVRDGNTGGFKTIF;TRB:CASSELKTGGAFF |

### GATA3 Specific TCR DNA Synthesis and Cloning

[0825] Clonotype 1 TCR alpha and beta sequence were codon optimized according to human codon usage frequency for maximum expression in human cell line and PBMC (Table 32). The TCR gene encoded lenti-virus plasmid (FIG. 40) was evaluated by DNA sequencing and restriction enzyme digest. DNA sequence data of final GATA3 neoORF specific TCR encoded plasmid is 100% matched with TCR alpha and beta codon optimized sequence (bold font in FIG. 41). After the restriction enzyme AfIII digestion, two DNA bands were observed; one band between 6000 bp and 5000 bp, and the other band between 4000 bp and 3000 bp. These bands correlate with the expected size of 5590 bp and 3424 bp, respectively (FIG. 42).

Table 33 below shows GATA3 specific TCR alpha and beta DNA sequence and codon optimized sequence.

| | Clonotype 1 TCR |
|---|---|
| Clonotype 1 TCR alpha | alpha codon optimized |
| ATGGCTTTTTGGCTGAGAAGGCTGGGTCTAC | ATGGCCTTCTGGCTGAGGAGACTGGGTTTAC |
| ATTTCAGGCCACATTTGGGGAGACGAATGGA | ACTTCAGACCCCATTTAGGCAGAAGAATGGA |
| GTCATTCCTGGGAGGTGTTTTGCTGATTTTG | GAGCTTTTTAGGCGGCGTGCTGCTGATTTTA |
| TGGCTTCAAGTGGACTGGGTGAAGAGCCAAA | TGGCTGCAAGTTGACTGGGTGAAGAGCCAGA |
| AGATAGAACAGAATTCCGAGGCCCTGAACAT | AGATCGAGCAGAACAGCGAGGCTTTAAACAT |
| TCAGGAGGGTAAAACGGCCACCCTGACCTGC | TCAAGAAGGCAAGACAGCCACTTTAACTTGT |
| AACTATACAAACTATTCTCCAGCATACTTAC | AACTATACCAACTACTCCCCCGCTTATTTAC |
| AGTGGTACCGACAAGATCCAGGAAGAGGCCC | AGTGGTACAGACAAGATCCCGGCAGAGGCCC |
| TGTTTTCTTGCTACTCATACGTGAAAATGAG | CGTGTTTTTACTGCTGATTCGTGAGAACGAG |
| AAAGAAAAAAGGAAAGAAAGACTGAAGGTCA | AAGGAGAAGAGGAAGGAGAGACTGAAGGTGA |
| CCTTTGATACCACCCTTAAACAGAGTTTGTT | CCTTCGACACCACTTTAAAGCAGTCTTTATT |
| TCATATCACAGCCTCCCAGCCTGCAGACTCA | CCACATCACCGCCAGCCAGCCCGCTGATAGC |
| GCTACCTACCTCTGTGCTCTAGACATTTATG | GCCACCTATTTATGCGCTTTAGACATCTACG |
| GGAACAACAGACTCGCTTTTGGGAAGGGGAA | GCACAAACAATCGTCTGGCCTTCGGCAAGGG |
| CGTGGTGGTCATACCA | CAACCAAGTTGTGGTGATCCCC |
| | Clonotype 1 TCR |
| Clonotype 1 TCR beta | beta codon optimized |
| ATGGGAATCAGGCTCCTCTGTCGTGTGGCCT | ATGGGCATTCGTCTGCTGTGTCGTGTGGCCT |
| TTTGTTTCCTGGCTGTAGGCCTCGTAGATGT | TCTGCTTTTTAGCCGTGGGTTTAGTGGACGT |
| GAAAGTAACCCAGAGCTCGAGATATCTAGTC | GAAGGTGACCCAGTCCTCTCGTTATTTAGTG |
| AAAAGGACGGGAGAGAAAGTTTTTCTGGAAT | AAGAGGACCGGCGAGAAGGTGTTTTTAGAAT |
| GTGTCCAGGATATGGACCATGAAAATATGTT | GCGTGCAAGATATGGACCACGAGAACATGTT |
| CTGGTATCGACAAGACCCAGGTCTGGGGCTA | CTGGTACAGACAAGATCCCGGACTGGGTTTA |
| CGGCTGATCTATTTCTCATATGATGTTAAAA | AGGCTGATCTACTTCAGCTACGACGTGAAGA |
| TGAAAGAAAAAGGAGATATTCCTGAGGGGTA | TGAAGGAGAAGGGCGACATCCCCGAGGGCTA |
| CAGTGTCTCTAGAGAGAAGAAGGAGCGCTTC | CTCCGTGTCTCGTGAGAAGAAGGAGAGGTTC |
| TCCCTGATTCTGGAGTCCGCCAGCACCAACC | TCTTTAATTTTAGAGTCCGCCAGCACCAACC |
| AGACATCTATGTACCTCTGTGCCAGCAGTTT | AGACCAGCATGTATTTATGCGCCAGCTCTTT |
| AGATTTTGTGCTAGCGGGGTCCTACTCCTAC | AGACTTTGTGCTGGCCGGCAGCTACAGCTAC |
| AATGAGCAGTTCTTCGGGCCAGGGACACGGC | AACGAGCAGTTCTTCGGCCCCGGCACCAGAC |
| TCACCGTGCTAG | TGACCGTGCTG |

### GATA3 Specific TCR Expression

[0826] For GATA3 specific TCR expressed Jurkat cells, lenti-virus system was used after HEK 293T cell line transfection with GATA3 specific TCR construct and the lenti-virus was transduced into Jurkat cells. The transduced and puromycin selected Jurkat cells were stained with GATA3 multimer-PE and GATA3 multimer-BV650 and compared with non-transduced Jurkat cells to verify GATA3 specific TCR expression. 73.1% of cells were positive for both GATA3 multimer-PE and GATA3 multimer-BV650, indicating GATA3 neoORF specific TCR expression (FIG. 43)

### Peptide Titration Test

[0827] To verify the recombinant TCR is functional, peptide concentrations from 20 μM to 0.2 μM were tested with GATA3 specific TCR transduced Jurkat cells. IL-2 secretion levels from the Jurkat cells showed non-linear correlation with GATA3 peptide concentration with an observed EC₅₀=37.85 nM (FIG. 44).

### IL-2 Release Assay of GATA3 Specific TCR Transduced Jurkat

[0828] To verify the recognition of endogenous GATA3 mutation antigen by the GATA3 mutation specific TCR Jurkat, the mutation transduced HEK 293T cells were used as a target cell and co-cultured with GATA3 TCR transduced Jurkat cells. IL-2 level was higher in the GATA3 mutation peptide loaded HEK 293T cell group (circles) than irrelevant peptide loaded cell group (triangles) in FIG. 45. IL-2 level was also higher in the GATA3 mutation transduced target cell group (squares) than irrelevant gene transduced target cell group (inverted triangle) in FIG. 45.

[0829] In this study, a TCR was cloned from a CD8+ T cell specific for a GATA3 neoantigen presented on HLA-A02:01. The avidity of the TCR was defined to be less than 40 nM by peptide titration (EC50) and the TCR was able to recognize a GATA3 neoORF expressing cell line. These data confirm generation of CD8⁺ T cells that have potent TCRs that can recognize cells with the GATA3 neoORF mutation.

### Examples 27—Example 41 Described Below Relates to Mutant BTK and Mutant EGFR Peptides

### Example 27 Intracellular Cytokine Staining Assay

[0830] Induction of BTK neo-antigen specific CD4+ and CD8+ T cell responses and tetramer staining assay is performed as described in Example 1 and Example 2. Induction of EGFR neo-antigen specific CD4⁺ and CD8⁺ T cell responses and tetramer staining assay is performed as described in Example 1 and Example 2. In the absence of well-established tetramer staining to identify antigen-specific T cell populations, antigen-specificity can be estimated using assessment of cytokine production using well-established flow cytometry assays. Briefly, T cells are stimulated with the peptide of interest and compared to a control. After stimulation, production of cytokines by CD4⁺ T cells (e.g., IFNγ and TNFα) are assessed by intracellular staining. These cytokines, especially IFNγ, can be used to identify stimulated cells. FACS analysis of antigen-specific induction of IFNγ and TNFα levels of CD4+ cells from a healthy donor stimulated with APCs loaded with or without a mutant BTK is performed. FACS analysis of antigen-specific induction of IFNγ and TNFα levels of CD4+ cells from a healthy donor stimulated with APCs loaded with or without a mutant EGFR peptide is performed.

### Example 28—ELISPOT Assay

[0831] Peptide-specific T cells are functionally enumerated using the ELISPOT assay (BD Biosciences), which measures the release of IFNγ from T cells on a single cell basis. Target cells (T2 or HLA-A0201 transfected C1Rs) were pulsed with 10 μM peptide for 1 hour at 37° C., and washed three times. 1×10⁵ peptide-pulsed targets are co-cultured in the ELISPOT plate wells with varying concentrations of T cells (5×10² to 2×10³) taken from the immunogenicity culture. Plates are developed according to the manufacturer's protocol, and analyzed on an ELISPOT reader (Cellular Technology Ltd.) with accompanying software. Spots corresponding to the number of IFNγ-producing T cells are reported as the absolute number of spots per number of T cells plated. T cells expanded on modified peptides are tested not only for their ability to recognize targets pulsed with the modified peptide, but also for their ability to recognize targets pulsed with the parent peptide. The IFNγ levels of samples mock transduced or transduced with a lentiviral expression vector encoding a mutant BTK peptide or mutant EGFR peptide are determined.

### Example 29—CD107 Staining Assay

[0832] CD107a and b are expressed on the cell surface of CD8⁺ T cells following activation with cognate peptide. The lytic granules of T cells have a lipid bilayer that contains lysosomal-associated membrane glycoproteins (“LAMPs”), which include the molecules CD107a and b. When cytotoxic T cells are activated through the T cell receptor, the membranes of these lytic granules mobilize and fuse with the plasma membrane of the T cell. The granule contents are released, and this leads to the death of the target cell. As the granule membrane fuses with the plasma membrane, C107a and b are exposed on the cell surface, and therefore are markers of degranulation. Because degranulation as measured by CD107a and b staining is reported on a single cell basis, the assay is used to functionally enumerate peptide-specific T cells. To perform the assay, peptide is added to HLA-A02:01-transfected cells CIR to a final concentration of 20 μM, the cells are incubated for 1 hour at 37° C., and washed three times. 1×10⁵ of the peptide-pulsed C1R cells are aliquoted into tubes, and antibodies specific for CD107a and b are added to a final concentration suggested by the manufacturer (Becton Dickinson). Antibodies are added prior to the addition of T cells in order to “capture” the CD107 molecules as they transiently appear on the surface during the course of the assay. 1×10⁵ T cells from the immunogenicity culture are added next, and the samples were incubated for 4 hours at 37° C. The T cells are further stained for additional cell surface molecules such as CD8 and acquired on a FACS Calibur instrument (Becton Dickinson). Data is analyzed using the accompanying Cellquest software, and results are reported as the percentage of CD8⁺/CD107a and b⁺ cells.

### Example 30—Cytotoxicity Assays

[0833] Cytotoxic activity is measured using method 1 or method 2. Method 1 entails a chromium release assay. Target T2 cells are labeled for 1 hour at 37° C. with Na⁵¹Cr and washed 5×10³ target T2 cells are then added to varying numbers of T cells from the immunogenicity culture. Chromium release is measured in supernatant harvested after 4 hours of incubation at 37° C. The percentage of specific lysis is calculated as:

Experimental release−spontaneous release/Total release−spontaneous release×100. Equation 10.

In method 2 Cytotoxicity activity is measured with the detection of cleaved Caspase 3 in target cells by Flow cytometry. Target cancer cells are engineered to express the mutant peptide along with the proper MHC-I allele. Mock-transduced target cells (i.e. not expressing the mutant peptide) are used as a negative control. The cells are labeled with CFSE to distinguish them from the stimulated PBMCs used as effector cells. The target and effector cells are co-cultured for 6 hours before being harvested. Intracellular staining is performed to detect the cleaved form of Caspase 3 in the CFSE-positive target cancer cells. The percentage of specific lysis is calculated as:

Experimental cleavage of Caspase 3/spontaneous cleavage of Caspase 3(measured in the absence of mutant peptide expression)×100. Equation 11.

[0834] The method 2 cytotoxicity assay is provided in materials and methods section of Example 25 herein.

### Example 31—Enhanced CD8⁺ T Cell Responses In Vivo Using Longmers and Shortmers Sequentially

[0835] Vaccination with longmer peptides can induce both CD4⁺ and CD8⁺ T cell responses, depending on the processing and presentation of the peptides. Vaccination with minimal shortmer epitopes focuses on generating CD8⁺ T cell responses, but does not require peptide processing before antigen presentation. As such, any cell can present the epitope readily, not just professional antigen-presenting cells (APCs). This may lead to tolerance of T cells that come in contact with healthy cells presenting antigens as part of peripheral tolerance. To circumvent this, initial immunization with longmers allows priming of CD8⁺ T cells only by APCs that can process and present the peptides. Subsequent immunizations boosts the initial CD8⁺ T cell responses.

### In Vivo Immunogenicity Assays

[0836] Nineteen 8-12 week old female C57BL/6 mice (Taconic Biosciences) are randomly and prospectively assigned to treatment groups on arrival. Animals are acclimated for three (3) days prior to study commencement. Animals are maintained on LabDiet™ 5053 sterile rodent chow and sterile water provided ad libitum. Animals in Group 1 serve as vaccination adjuvant-only controls and are administered polyinosinic:polycytidylic acid (polyL:C) alone at 100 μg in a volume of 0.1 mL administered via subcutaneous injection (s.c.) on day 0, 7, and 14. Animals in Group 2 are administered 50 μg each of six longmer peptides (described below) along with polyL:C at 100 μg s.c. in a volume of 0.1 mL on day 0, 7 and 14. Animals in Group 3 are administered 50 μg each of six longmer peptides (described below) along with polyL:C at 100 μg s.c. in a volume of 0.1 mL on day 0 and molar-matched equivalents of corresponding shortmer peptides (described below) along with polyL:C at 100 μg s.c. in a volume of 0.1 mL on day 7 and 14. Animals are weighed and monitored for general health daily. Animals are euthanized by CO2 overdose at study completion Day 21, if an animal lost >30% of its body weight compared to weight at Day 0; or if an animal was found moribund. At sacrifice, spleens are harvested and processed into single-cell suspensions using standard protocols. Briefly, spleens are mechanical degraded through a 70 μM filter, pelleted, and lysed with ACK lysis buffer (Sigma) before resuspension in cell culture media.

### Peptides

[0837] Six previously identified murine neoantigens are used based on their demonstrated ability to induce CD8⁺ T cell responses. For each neoantigen, shortmers (8-11 amino acids) corresponding to the minimal epitope have been defined. Longmers corresponding to 20-27 amino acids surrounding the mutation are used.

### ELISPOT

[0838] ELISPOT analysis (Mouse IFNγ ELISPOT Reasy-SET-Go; EBioscience) is performed according to the kit protocol. Briefly, one day prior to day of analysis, 96-well filter plates (0.45 μm pore size hydrophobic PVDF membrane; EMD Millipore) are activated (35% EtOH), washed (PBS) and coated with capture antibody (1:250; 4° C. O/N). On the day of analysis, wells are washed and blocked (media; 2 hours at 37° C.). Approximately 2×10⁵ cells in 100 μL is added to the wells along with 100 μL of 10 mM test peptide pool (shortmers), or PMA/ionomycin positive control antigen, or vehicle. Cells are incubated with antigen overnight (16-18 hours) at 37° C. The next day, the cell suspension is discarded, and wells are washed once with PBS, and twice with deionized water. For all wash steps in the remainder of the assay, wells are allowed to soak for 3 minutes at each wash step. Wells are then washed three times with wash buffer (PBS+0.05% Tween-20), and detection antibody (1:250) is added to all wells. Plates are incubated for two hours at room temperature. The detection antibody solution is discarded, and wells are washed three times with wash buffer. Avidin-HRP (1:250) is added to all wells, and plates are incubated for one hour at room temperature. Conjugate solution is discarded, and wells washed three times with wash buffer, then once with PBS. Substrate (3-amino-9-ethyl-carbazole, 0.1 M Acetate buffer, H₂O₂) is added to all wells, and spot development monitored (approximately 10 minutes). Substrate reaction is stopped by washing wells with water, and plates are allowed to air-dry overnight. The plates are analyzed on an ELISPOT reader (Cellular Technology Ltd.) with accompanying software. Spots corresponding to the number of IFNγ-producing T cells are reported as the absolute number of spots per number of T cells plated.

### Example 32—Detection of Mutant BTK Peptides by Mass Spectrometry

[0839] 293T cells are transduced with a lentiviral vector encoding various regions of a mutant BTK peptide. 50-100 million of the transduced cells expressing peptides encoded by the mutant BTK peptide are cultured and peptides are eluted from HLA-peptide complexes using an acid wash. Eluted peptides were then analyzed by MS/MS.

### Example 33 Mutant BTK Peptides Produce Strong Epitopes on Multiple Alleles

[0840] Multiple peptides containing the neoepitopes are expressed or loaded onto antigen presenting cells (APCs). Mass spectrometry was then performed and the affinity of the neoepitopes for the indicated HLA alleles and stability of the neoepitopes with the HLA alleles is determined.

### Example 34 Multiple BTK Neoepitopes Elicit CD8+ T Cell Responses

[0841] PBMC samples from a human donor can be used to perform antigen specific T cell induction. CD8+ T cell inductions are analyzed after manufacturing T cells. Cell samples can be taken out at different time points for analysis. pMHC multimers are used to monitor the fraction of antigen specific CD8+ T cells in the induction cultures.

### Example 35 Predicted HLA Specificities of Mutant BTK Neopeptides

[0842] Specific BTK neopeptides were run on proprietary RECON algorithm to predict HLA specificities. Neopeptides were ranked based on predicted binding affinities. Table 38 depicts the allelic specificities that are further ranked based on high to low affinity. A lower rank value indicates stronger affinity. Table 38 further demonstrates that the mutant BTK neopeptides identified and characterized herein have strong epitopes with multiple alleles.

| | IFIITEYMANGS | |
|---|---|---|
| BTK, C481S | LLNYLREMRHR | |
| PEPTIDE | ALLELE | RANK |
| ANGSLLNY | HLA-A36:01 | 24 |
| ANGSLLNYL | HLA-C15:02 | 14 |
| ANGSLLNYL | HLA-C08:01 | 19 |
| ANGSLLNYL | HLA-C06:02 | 19 |
| ANGSLLNYL | HLA-A02:04 | 21 |
| ANGSLLNYL | HLA-C12:02 | 25 |
| ANGSLLNYL | HLA-B44:02 | 26 |
| ANGSLLNYL | HLA-C17:01 | 27 |
| ANGSLLNYL | HLA-B38:01 | 27 |
| ANGSLLNYLR | HLA-A74:01 | 19 |
| ANGSLLNYLR | HLA-A31:01 | 26 |
| EYMANGSL | HLA-C14:02 | 13 |
| EYMANGSL | HLA-C14:03 | 13 |
| EYMANGSL | HLA-A24:02 | 25 |
| EYMANGSLL | HLA-A24:02 | 3 |
| EYMANGSLL | HLA-A23:01 | 9 |
| EYMANGSLL | HLA-C14:02 | 11 |
| EYMANGSLL | HLA-C14:03 | 12 |
| EYMANGSLL | HLA-A33:03 | 19 |
| EYMANGSLL | HLA-C04:01 | 20 |
| EYMANGSLL | HLA-B15:09 | 22 |
| EYMANGSLL | HLA-B38:01 | 23 |
| EYMANGSLLN | HLA-A24:02 | 24 |
| EYMANGSLLN | HLA-A23:01 | 27 |
| EYMANGSLLNY | HLA-A29:02 | 27 |
| GSLLNYLR | HLA-A31:01 | 16 |
| GSLLNYLR | HLA-A74:01 | 23 |
| GSLLNYLREM | HLA-B58:02 | 15 |
| GSLLNYLREM | HLA-B57:01 | 27 |
| ITEYMANGS | HLA-A01:01 | 23 |
| ITEYMANGSL | HLA-A01:01 | 20 |
| ITEYMANGSLL | HLA-A01:01 | 21 |
| MANGSLLNY | HLA-C02:02 | 1 |
| MANGSLLNY | HLA-C03:02 | 2 |
| MANGSLLNY | HLA-B53:01 | 2 |
| MANGSLLNY | HLA-B35:01 | 4 |
| MANGSLLNY | HLA-A29:02 | 11 |
| MANGSLLNY | HLA-C12:02 | 11 |
| MANGSLLNY | HLA-C12:03 | 11 |
| MANGSLLNY | HLA-A30:02 | 12 |
| MANGSLLNY | HLA-A36:01 | 12 |
| MANGSLLNY | HLA-A26:01 | 16 |
| MANGSLLNY | HLA-A01:01 | 17 |
| MANGSLLNY | HLA-B15:01 | 17 |
| MANGSLLNY | HLA-A25:01 | 18 |
| MANGSLLNY | HLA-B57:01 | 19 |
| MANGSLLNY | HLA-B58:01 | 22 |
| MANGSLLNY | HLA-A03:01 | 23 |
| MANGSLLNY | HLA-B46:01 | 23 |
| MANGSLLNY | HLA-B15:03 | 24 |
| MANGSLLNY | HLA-A33:03 | 25 |
| MANGSLLNY | HLA-B35:03 | 28 |
| MANGSLLNY | HLA-A11:01 | 28 |
| MANGSLLNYL | HLA-C17:01 | 17 |
| MANGSLLNYL | HLA-C02:02 | 18 |
| MANGSLLNYL | HLA-B35:01 | 18 |
| MANGSLLNYL | HLA-C03:03 | 21 |
| MANGSLLNYL | HLA-C08:01 | 24 |
| MANGSLLNYL | HLA-B35:03 | 24 |
| MANGSLLNYL | HLA-C12:02 | 25 |
| MANGSLLNYL | HLA-C01:02 | 26 |
| MANGSLLNYL | HLA-C03:04 | 28 |
| MANGSLLNYL | HLA-C08:02 | 28 |
| MANGSLLNYLR | HLA-A33:03 | 24 |
| MANGSLLNYLR | HLA-A74:01 | 28 |
| NGSLLNYL | HLA-B14:02 | 19 |
| NGSLLNYLR | HLA-A68:01 | 14 |
| NGSLLNYLR | HLA-A33:03 | 16 |
| NGSLLNYLR | HLA-A31:01 | 25 |
| NGSLLNYLR | HLA-A74:01 | 26 |
| SLLNYLREM | HLA-A02:04 | 5 |
| SLLNYLREM | HLA-A02:01 | 13 |
| SLLNYLREM | HLA-A02:03 | 16 |
| SLLNYLREM | HLA-C03:02 | 16 |
| SLLNYLREM | HLA-A03:01 | 19 |
| SLLNYLREM | HLA-A32:01 | 20 |
| SLLNYLREM | HLA-A02:07 | 20 |
| SLLNYLREM | HLA-C14:03 | 20 |
| SLLNYLREM | HLA-C14:02 | 20 |
| SLLNYLREM | HLA-A31:01 | 21 |
| SLLNYLREM | HLA-A30:02 | 22 |
| SLLNYLREM | HLA-A74:01 | 22 |
| SLLNYLREM | HLA-C06:02 | 24 |
| SLLNYLREM | HLA-B15:03 | 25 |
| SLLNYLREM | HLA-B46:01 | 25 |
| SLLNYLREM | HLA-B13:02 | 25 |
| SLLNYLREM | HLA-A25:01 | 26 |
| SLLNYLREM | HLA-A29:02 | 28 |
| SLLNYLREM | HLA-C01:02 | 28 |
| SLLNYLREMR | HLA-A74:01 | 14 |
| SLLNYLREMR | HLA-A31:01 | 20 |
| TEYMANGSL | HLA-B40:01 | 8 |
| TEYMANGSL | HLA-B40:02 | 8 |
| TEYMANGSL | HLA-B14:02 | 11 |
| TEYMANGSL | HLA-B49:01 | 14 |
| TEYMANGSL | HLA-B44:03 | 16 |
| TEYMANGSL | HLA-B44:02 | 17 |
| TEYMANGSL | HLA-B37:01 | 19 |
| TEYMANGSL | HLA-B18:01 | 20 |
| TEYMANGSL | HLA-B15:09 | 23 |
| TEYMANGSL | HLA-B41:01 | 25 |
| TEYMANGSL | HLA-B50:01 | 25 |
| TEYMANGSLL | HLA-B40:01 | 7 |
| TEYMANGSLL | HLA-B44:03 | 15 |
| TEYMANGSLL | HLA-B49:01 | 17 |
| TEYMANGSLL | HLA-B44:02 | 21 |
| TEYMANGSLL | HLA-B40:02 | 24 |
| TEYMANGSLLNY | HLA-B44:03 | 21 |
| YMANGSLL | HLA-B15:09 | 14 |
| YMANGSLL | HLA-C03:04 | 15 |
| YMANGSLL | HLA-C03:03 | 16 |
| YMANGSLL | HLA-C17:01 | 16 |
| YMANGSLL | HLA-C03:02 | 21 |
| YMANGSLL | HLA-C14:03 | 22 |
| YMANGSLL | HLA-C14:02 | 23 |
| YMANGSLL | HLA-C04:01 | 24 |
| YMANGSLL | HLA-C02:02 | 26 |
| YMANGSLL | HLA-A01:01 | 26 |
| YMANGSLLN | HLA-A29:02 | 25 |
| YMANGSLLN | HLA-A01:01 | 25 |
| YMANGSLLNY | HLA-A01:01 | 6 |
| YMANGSLLNY | HLA-A29:02 | 10 |
| YMANGSLLNY | HLA-A36:01 | 16 |
| YMANGSLLNY | HLA-A03:01 | 16 |
| YMANGSLLNY | HLA-B46:01 | 18 |
| YMANGSLLNY | HLA-A25:01 | 19 |
| YMANGSLLNY | HLA-B15:01 | 20 |
| YMANGSLLNY | HLA-A26:01 | 20 |
| YMANGSLLNY | HLA-A30:02 | 21 |
| YMANGSLLNY | HLA-A32:01 | 24 |

### Example 36 Affinity and Stability of Mutant BTK Neopeptides

[0843] Multiple peptides containing neoepitopes in the table below were either expressed or loaded onto antigen presenting cells. Mass spectrometry was then performed and the affinity of the neoepitopes for indicated HLA alleles were determined, and the stability of the neoepitopes with the HLA alleles were determined.

### Table 39 Shows the Respective Affinity and Stability of the Mutant BTK Peptides.

| | HLA | Peptide | Affinity | Stability |
|---|---|---|---|---|
| Gene | Allele | Sequence | (nM) | (1/2 hr) |
| BTK, C481S | A01.01 | YMANGSLLNY | 13.24495 | 0.866167 |
| BTK, C481S | A01.01 | MANGSLLNY | 439.029 | 0.216408 |
| BTK, C481S | A03.01 | MANGSLLNY | 35.62463 | 0.237963 |
| BTK, C481S | A03.01 | YMANGSLLNY | 95.93212 | 0.279088 |
| BTK, C481S | A11.01 | MANGSLLNY | 535.6333 | NB |
| BTK, C481S | A11.01 | YMANGSLLNY | 974.2881 | NB |
| BTK, C481S | A24.02 | EYMANGSLL | 4.961145 | 5.716141 |
| BTK_C481S | A02.01 | SLLNYLREM | 67.69132 | 3.043604 |
| BTK_C481S | A02.01 | MANGSLLNYL | 1006.566 | 0 |
| BTK_C481S | A02.01 | YMANGSLLN | 3999.442 | 0 |
| BTK_C481S | B07.02 | SLLNYLREM | 865.8805 | 0 |
| BTK_C481S | B07.02 | MANGSLLNYL | 16474.59 | 0 |
| BTK_C481S | B08.01 | SLLNYLREM | 959.6542 | 0 |
| BTK_C481S | B08.01 | MANGSLLNYL | 18463.09 | 0 |

### Example 37—Detection of Mutant EGFR Peptides by Mass Spectrometry

[0845] T cells are transduced with a lentiviral vector encoding various regions of a mutant EGFR peptide. 50-100 million of the transduced cells expressing peptides encoded by the mutant EGFR peptide are cultured and peptides are eluted from HLA-peptide complexes using an acid wash. Eluted peptides were then analyzed by MS/MS.

### Example 38—Mutant EGFR Peptides Produce Strong Epitopes on Multiple Alleles

[0846] Multiple peptides containing the neoepitopes are expressed or loaded onto antigen presenting cells (APCs). Mass spectrometry was then performed and the affinity of the neoepitopes for the indicated HLA alleles and stability of the neoepitopes with the HLA alleles is determined.

### Example 39—Multiple EGFR Neoepitopes Elicit CD8+ T Cell Responses

[0847] PBMC samples from a human donor can be used to perform antigen specific T cell induction. CD8⁺ T cell inductions are analyzed after manufacturing T cells. Cell samples can be taken out at different time points for analysis. pMHC multimers are used to monitor the fraction of antigen specific CD8⁺ T cells in the induction cultures.

### Example 40—Predicted HLA Specificities of EGFR Neopeptides

[0848] Specific neopeptides were run on proprietary RECON algorithm to predict HLA specificities. Neopeptides were ranked based on predicted binding affinities. Table 43 depicts the allelic specificities that are further ranked based on high to low affinity. A lower rank value indicates stronger affinity. Table 43 also demonstrates that the mutant EGFR neopeptides identified and characterized herein have strong epitopes with multiple alleles.

TABLE 43

| PEPTIDE | ALLELE | RANK |
|---|---|---|
| LIMQLMPF | HLA-C03:02 | 5 |
| LTSTVQLIM | HLA-C12:03 | 10 |
| | HLA-A01:01 | 13 |
| | HLA-C15:02 | 13 |
| | HLA-B57:01 | 14 |
| | HLA-B57:03 | 15 |
| | HLA-A36:01 | 16 |
| | HLA-C12:02 | 18 |
| | HLA-C03:03 | 19 |
| | HLA-B58:02 | 21 |
| QLIMQLMPF | HLA-B15:01 | 15 |
| | HLA-A26:01 | 21 |
| STVQLIMQL | HLA-A68:02 | 1 |
| | HLA-C15:02 | 2 |
| | HLA-A25:01 | 3 |
| | HLA-B57:03 | 4 |
| | HLA-C12:02 | 4 |
| | HLA-A26:01 | 5 |
| | HLA-C12:03 | 6 |
| | HLA-C06:02 | 7 |
| | HLA-C03:03 | 8 |
| | HLA-A30:01 | 9 |
| | HLA-C02:02 | 9 |
| | HLA-A11:01 | 10 |
| | HLA-A32:01 | 10 |
| | HLA-A02:04 | 10 |
| | HLA-A68:01 | 11 |
| | HLA-B15:09 | 11 |
| | HLA-C03:04 | 12 |
| | HLA-B38:01 | 18 |
| | HLA-B57:01 | 19 |
| | HLA-A02:03 | 20 |
| | HLA-C08:01 | 21 |
| | HLA-B35:01 | 21 |
| | HLA-B40:01 | 21 |
| STVQLIMQLM | HLA-A26:01 | 15 |
| | HLA-B57:01 | 17 |
| TSTVQLIMQL | HLA-C15:02 | 17 |
| TVQLIMQL | HLA-C17:01 | 11 |
| | HLA-B08:01 | 12 |
| | HLA-B42:01 | 13 |
| | HLA-B14:02 | 15 |
| | HLA-B37:01 | 15 |
| | HLA-B15:09 | 17 |
| TVQLIMQLM | HLA-B35:03 | 21 |
| VQLIMQLM | HLA-B52:01 | 8 |
| | HLA-B14:02 | 19 |
| | HLA-B37:01 | 19 |

### Example 41 Affinity and Stability of Mutant EGFR Neopeptides

[0849] Multiple peptides containing neoepitopes in the table below were either expressed or loaded onto antigen presenting cells. Mass spectrometry was then performed and the affinity of the neoepitopes for indicated HLA alleles were determined, and the stability of the neoepitopes with the HLA alleles were determined. Table 44 shows the respective affinity and stability of the mutant EGFR peptides.

TABLE 44

| | HLA | Peptide | Affinity | Stability |
|---|---|---|---|---|
| Gene | Allele | Sequence | (nM) | (1/2 hr) |
| EGFR, T790M | A01.01 | LTSTVQLIM | 2891.111 | 0.103721 |
| EGFR_T790M | A01.01 | CLTSTVQLIM | 8276.876 | 0 |
| EGFR_T790M | A02.01 | MQLMPFGCLL | 16.26147 | 0.381118 |
| EGFR_T790M | A02.01 | MQLMPFGCL | 116.3352 | 0.368273 |
| EGFR_T790M | A02.01 | LIMQLMPFGC | 132.4766 | 0.381284 |
| EGFR_T790M | A02.01 | QLIMQLMPF | 192.8406 | 0.34067 |
| EGFR_T790M | A02.01 | CLTSTVQLIM | 537.1391 | 0 |
| EGFR_T790M | A02.01 | IMQLMPFGCL | 653.1065 | 0.515559 |
| EGFR_T790M | A02.01 | IMQLMPFGC | 1205.368 | 0.370112 |
| EGFR_T790M | A02.01 | LIMQLMPFG | 3337.708 | 0 |
| EGFR_T790M | A02.01 | VQLIMQLMPF | 4942.892 | 0 |
| EGFR_T790M | A02.01 | QLIMQLMPFG | 5214.668 | 0 |
| EGFR_T790M | A02.01 | STVQLIMQL | 7256.773 | 0 |
| EGFR_T790M | A24.02 | QLIMQLMPF | 2030.807 | 0.368673 |
| EGFR_T790M | A24.02 | VQLIMQLMPF | 4103.131 | 0 |
| EGFR_T790M | A24.02 | IMQLMPFGCL | 14119.38 | 0 |
| EGFR_T790M | A24.02 | MQLMPFGCLL | 18857.47 | 0 |
| EGFR_T790M | B07.02 | MQLMPFGCL | 1589.188 | 0 |
| EGFR_T790M | B08.01 | QLIMQLMPF | 330.1933 | 0 |
| EGFR_T790M | B08.01 | IMQLMPFGCL | 427.3913 | 0 |
| EGFR_T790M | B08.01 | MQLMPFGCL | 4931.727 | 0 |
| EGFR_T790M | B08.01 | MQLMPFGCLL | 11244.9 | 0 |
| EGFR_T790M | B08.01 | VQLIMQLMPF | 16108.18 | 0 |
| EGFR_T790M | B08.02 | QLIMQLMPF | 5590.3 | ND |

The application's sequence listing, which the Patent Office published only in electronic form, follows.

SEQUENCE LISTING (3872 sequences)

SEQ ID NO: 1 - protein, 201 aa, Homo sapiens
MRRLSAARRAGTSCANCQTTTTTLWRRNANGDPVCNACGLYYKLHNINRPLTMKKEGIQTRNRKMSSKSKKCKKVHDSLEDFPKNSSFPGRPLQTHVLPEPHLALQPLQPHADHAHADAPAIQPVLWTTPPLQHGHRHGLEPCSMLTGPPARVPAVPFDLHFCRSSIMKPKRDGYMFLKAESKIMFATLQRSSLWCLCSNH

SEQ ID NO: 2 - protein, 113 aa, Homo sapiens
PGRPLQTHVLPEPHLALQPLQPHADHAHADAPAIQPVLWTTPPLQHGHRHGLEPCSMLTGPPARVPAVPFDLHFCRSSIMKPKRDGYMFLKAESKIMFATLQRSSLWCLCSNH

SEQ ID NO: 3 - protein, 52 aa, Homo sapiens
PGRPLQTHVLPEPHLALQPLQPHADHAHADAPAIQPVLWTTPPLQHGHRHGL

SEQ ID NO: 4 - protein, 61 aa, Homo sapiens
EPCSMLTGPPARVPAVPFDLHFCRSSIMKPKRDGYMFLKAESKIMFATLQRSSLWCLCSNH

SEQ ID NO: 5 - protein, 10 aa, Homo sapiens
TLQRSSLWCL

SEQ ID NO: 6 - protein, 9 aa, Homo sapiens
VLPEPHLAL

SEQ ID NO: 7 - protein, 10 aa, Homo sapiens
HVLPEPHLAL

SEQ ID NO: 8 - protein, 9 aa, Homo sapiens
ALQPLQPHA

SEQ ID NO: 9 - protein, 9 aa, Homo sapiens
AIQPVLWTT

SEQ ID NO: 10 - protein, 11 aa, Homo sapiens
APAIQPVLWTT

SEQ ID NO: 11 - protein, 10 aa, Homo sapiens
SMLTGPPARV

SEQ ID NO: 12 - protein, 9 aa, Homo sapiens
MLTGPPARV

SEQ ID NO: 13 - protein, 10 aa, Homo sapiens
YMFLKAESKI

SEQ ID NO: 14 - protein, 9 aa, Homo sapiens
MFLKAESKI

SEQ ID NO: 15 - protein, 10 aa, Homo sapiens
YMFLKAESKI

SEQ ID NO: 16 - protein, 10 aa, Homo sapiens
VLWTTPPLQH

SEQ ID NO: 17 - protein, 9 aa, Homo sapiens
YMFLKAESK

SEQ ID NO: 18 - protein, 9 aa, Homo sapiens
KIMFATLQR

SEQ ID NO: 19 - protein, 9 aa, Homo sapiens
FATLQRSSL

SEQ ID NO: 20 - protein, 9 aa, Homo sapiens
EPHLALQPL

SEQ ID NO: 21 - protein, 10 aa, Homo sapiens
QPVLWTTPPL

SEQ ID NO: 22 - protein, 9 aa, Homo sapiens
GPPARVPAV

SEQ ID NO: 23 - protein, 10 aa, Homo sapiens
MFATLQRSSL

SEQ ID NO: 24 - protein, 9 aa, Homo sapiens
KPKRDGYMF

SEQ ID NO: 25 - protein, 10 aa, Homo sapiens
KPKRDGYMFL

SEQ ID NO: 26 - protein, 10 aa, Homo sapiens
IMKPKRDGYM

SEQ ID NO: 27 - protein, 10 aa, Homo sapiens
MFATLQRSSL

SEQ ID NO: 28 - protein, 10 aa, Homo sapiens
FLKAESKIMF

SEQ ID NO: 29 - protein, 9 aa, Homo sapiens
LHFCRSSIM

SEQ ID NO: 30 - protein, 9 aa, Homo sapiens
EPHLALQPL

SEQ ID NO: 31 - protein, 9 aa, Homo sapiens
FATLQRSSL

SEQ ID NO: 32 - protein, 9 aa, Homo sapiens
ESKIMFATL

SEQ ID NO: 33 - protein, 9 aa, Homo sapiens
FLKAESKIM

SEQ ID NO: 34 - protein, 10 aa, Homo sapiens
YMFLKAESKI

SEQ ID NO: 35 - protein, 10 aa, Homo sapiens
TLQRSSLWCL

SEQ ID NO: 36 - protein, 9 aa, Homo sapiens
VLPEPHLAL

SEQ ID NO: 37 - protein, 10 aa, Homo sapiens
HVLPEPHLAL

SEQ ID NO: 38 - protein, 9 aa, Homo sapiens
ALQPLQPHA

SEQ ID NO: 39 - protein, 9 aa, Homo sapiens
AIQPVLWTT

SEQ ID NO: 40 - protein, 11 aa, Homo sapiens
APAIQPVLWTT

SEQ ID NO: 41 - protein, 10 aa, Homo sapiens
SMLTGPPARV

SEQ ID NO: 42 - protein, 9 aa, Homo sapiens
MLTGPPARV

SEQ ID NO: 43 - protein, 10 aa, Homo sapiens
YMFLKAESKI

SEQ ID NO: 44 - protein, 9 aa, Homo sapiens
MFLKAESKI

SEQ ID NO: 45 - protein, 10 aa, Homo sapiens
YMFLKAESKI

SEQ ID NO: 46 - protein, 10 aa, Homo sapiens
VLWTTPPLQH

SEQ ID NO: 47 - protein, 9 aa, Homo sapiens
YMFLKAESK

SEQ ID NO: 48 - protein, 9 aa, Homo sapiens
KIMFATLQR

SEQ ID NO: 49 - protein, 9 aa, Homo sapiens
FATLQRSSL

SEQ ID NO: 50 - protein, 9 aa, Homo sapiens
EPHLALQPL

SEQ ID NO: 51 - protein, 10 aa, Homo sapiens
QPVLWTTPPL

SEQ ID NO: 52 - protein, 9 aa, Homo sapiens
GPPARVPAV

SEQ ID NO: 53 - protein, 10 aa, Homo sapiens
MFATLQRSSL

SEQ ID NO: 54 - protein, 9 aa, Homo sapiens
KPKRDGYMF

SEQ ID NO: 55 - protein, 10 aa, Homo sapiens
KPKRDGYMFL

SEQ ID NO: 56 - protein, 10 aa, Homo sapiens
IMKPKRDGYM

SEQ ID NO: 57 - protein, 10 aa, Homo sapiens
MFATLQRSSL

SEQ ID NO: 58 - protein, 10 aa, Homo sapiens
FLKAESKIMF

SEQ ID NO: 59 - protein, 9 aa, Homo sapiens
LHFCRSSIM

SEQ ID NO: 60 - protein, 9 aa, Homo sapiens
EPHLALQPL

SEQ ID NO: 61 - protein, 9 aa, Homo sapiens
FATLQRSSL

SEQ ID NO: 62 - protein, 9 aa, Homo sapiens
ESKIMFATL

SEQ ID NO: 63 - protein, 9 aa, Homo sapiens
FLKAESKIM

SEQ ID NO: 64 - protein, 10 aa, Homo sapiens
YMFLKAESKI

SEQ ID NO: 65 - protein, 14 aa, Homo sapiens
ESKIMFATLQRSSL

SEQ ID NO: 66 - protein, 16 aa, Homo sapiens
KPKRDGYMFLKAESKI

SEQ ID NO: 67 - protein, 18 aa, Homo sapiens
SMLTGPPARVPAVPFDLH

SEQ ID NO: 68 - protein, 21 aa, Homo sapiens
EPCSMLTGPPARVPAVPFDLH

SEQ ID NO: 69 - protein, 25 aa, Homo sapiens
LHFCRSSIMKPKRDGYMFLKAESKI

SEQ ID NO: 70 - protein, 26 aa, Homo sapiens
GPPARVPAVPFDLHFCRSSIMKPKRD

SEQ ID NO: 71 - protein, 33 aa, Homo sapiens
KPKRDGYMFLKAESKIMFATLQRSSLWCLCSNH

SEQ ID NO: 72 - protein, 14 aa, Homo sapiens
ESKIMFATLQRSSL

SEQ ID NO: 73 - protein, 16 aa, Homo sapiens
KPKRDGYMFLKAESKI

SEQ ID NO: 74 - protein, 18 aa, Homo sapiens
SMLTGPPARVPAVPFDLH

SEQ ID NO: 75 - protein, 21 aa, Homo sapiens
EPCSMLTGPPARVPAVPFDLH

SEQ ID NO: 76 - protein, 25 aa, Homo sapiens
LHFCRSSIMKPKRDGYMFLKAESKI

SEQ ID NO: 77 - protein, 26 aa, Homo sapiens
GPPARVPAVPFDLHFCRSSIMKPKRD

SEQ ID NO: 78 - protein, 33 aa, Homo sapiens; identical to SEQ ID NO: 71

SEQ ID NO: 79 - protein, 10 aa, Homo sapiens
TLQRSSLWCL

SEQ ID NO: 80 - protein, 9 aa, Homo sapiens
VLPEPHLAL

SEQ ID NO: 81 - protein, 10 aa, Homo sapiens
HVLPEPHLAL

SEQ ID NO: 82 - protein, 9 aa, Homo sapiens
ALQPLQPHA

SEQ ID NO: 83 - protein, 9 aa, Homo sapiens
AIQPVLWTT

SEQ ID NO: 84 - protein, 11 aa, Homo sapiens
APAIQPVLWTT

SEQ ID NO: 85 - protein, 10 aa, Homo sapiens
SMLTGPPARV

SEQ ID NO: 86 - protein, 9 aa, Homo sapiens
MLTGPPARV

SEQ ID NO: 87 - protein, 10 aa, Homo sapiens
YMFLKAESKI

SEQ ID NO: 88 - protein, 9 aa, Homo sapiens
MFLKAESKI

SEQ ID NO: 89 - protein, 10 aa, Homo sapiens
YMFLKAESKI

SEQ ID NO: 90 - protein, 10 aa, Homo sapiens
VLWTTPPLQH

SEQ ID NO: 91 - protein, 9 aa, Homo sapiens
YMFLKAESK

SEQ ID NO: 92 - protein, 9 aa, Homo sapiens
KIMFATLQR

SEQ ID NO: 93 - protein, 9 aa, Homo sapiens
FATLQRSSL

SEQ ID NO: 94 - protein, 9 aa, Homo sapiens
EPHLALQPL

SEQ ID NO: 95 - protein, 10 aa, Homo sapiens
QPVLWTTPPL

SEQ ID NO: 96 - protein, 9 aa, Homo sapiens
GPPARVPAV

SEQ ID NO: 97 - protein, 10 aa, Homo sapiens
MFATLQRSSL

SEQ ID NO: 98 - protein, 9 aa, Homo sapiens
KPKRDGYMF

SEQ ID NO: 99 - protein, 10 aa, Homo sapiens
KPKRDGYMFL

SEQ ID NO: 100 - protein, 10 aa, Homo sapiens
IMKPKRDGYM

SEQ ID NO: 101 - protein, 10 aa, Homo sapiens
MFATLQRSSL

SEQ ID NO: 102 - protein, 10 aa, Homo sapiens
FLKAESKIMF

SEQ ID NO: 103 - protein, 9 aa, Homo sapiens
LHFCRSSIM

SEQ ID NO: 104 - protein, 9 aa, Homo sapiens
EPHLALQPL

SEQ ID NO: 105 - protein, 9 aa, Homo sapiens
FATLQRSSL

SEQ ID NO: 106 - protein, 9 aa, Homo sapiens
ESKIMFATL

SEQ ID NO: 107 - protein, 9 aa, Homo sapiens
FLKAESKIM

SEQ ID NO: 108 - protein, 10 aa, Homo sapiens
YMFLKAESKI

SEQ ID NO: 109 - protein, 10 aa, Homo sapiens
TLQRSSLWCL

SEQ ID NO: 110 - protein, 9 aa, Homo sapiens
VLPEPHLAL

SEQ ID NO: 111 - protein, 10 aa, Homo sapiens
HVLPEPHLAL

SEQ ID NO: 112 - protein, 9 aa, Homo sapiens
ALQPLQPHA

SEQ ID NO: 113 - protein, 9 aa, Homo sapiens
AIQPVLWTT

SEQ ID NO: 114 - protein, 11 aa, Homo sapiens
APAIQPVLWTT

SEQ ID NO: 115 - protein, 10 aa, Homo sapiens
SMLTGPPARV

SEQ ID NO: 116 - protein, 9 aa, Homo sapiens
MLTGPPARV

SEQ ID NO: 117 - protein, 10 aa, Homo sapiens
YMFLKAESKI

SEQ ID NO: 118 - protein, 9 aa, Homo sapiens
MFLKAESKI

SEQ ID NO: 119 - protein, 10 aa, Homo sapiens
YMFLKAESKI

SEQ ID NO: 120 - protein, 10 aa, Homo sapiens
VLWTTPPLQH

SEQ ID NO: 121 - protein, 9 aa, Homo sapiens
YMFLKAESK

SEQ ID NO: 122 - protein, 9 aa, Homo sapiens
KIMFATLQR

SEQ ID NO: 123 - protein, 9 aa, Homo sapiens
FATLQRSSL

SEQ ID NO: 124 - protein, 9 aa, Homo sapiens
EPHLALQPL

SEQ ID NO: 125 - protein, 10 aa, Homo sapiens
QPVLWTTPPL

SEQ ID NO: 126 - protein, 9 aa, Homo sapiens
GPPARVPAV

SEQ ID NO: 127 - protein, 10 aa, Homo sapiens
MFATLQRSSL

SEQ ID NO: 128 - protein, 9 aa, Homo sapiens
KPKRDGYMF

SEQ ID NO: 129 - protein, 10 aa, Homo sapiens
KPKRDGYMFL

SEQ ID NO: 130 - protein, 10 aa, Homo sapiens
IMKPKRDGYM

SEQ ID NO: 131 - protein, 10 aa, Homo sapiens
MFATLQRSSL

SEQ ID NO: 132 - protein, 10 aa, Homo sapiens
FLKAESKIMF

SEQ ID NO: 133 - protein, 9 aa, Homo sapiens
LHFCRSSIM

SEQ ID NO: 134 - protein, 9 aa, Homo sapiens
EPHLALQPL

SEQ ID NO: 135 - protein, 9 aa, Homo sapiens
FATLQRSSL

SEQ ID NO: 136 - protein, 9 aa, Homo sapiens
ESKIMFATL

SEQ ID NO: 137 - protein, 9 aa, Homo sapiens
FLKAESKIM

SEQ ID NO: 138 - protein, 10 aa, Homo sapiens
YMFLKAESKI

SEQ ID NO: 139 - protein, 21 aa, Homo sapiens
EPCSMLTGPPARVPAVPFDLH

SEQ ID NO: 140 - protein, 18 aa, Homo sapiens
SMLTGPPARVPAVPFDLH

SEQ ID NO: 141 - protein, 26 aa, Homo sapiens
GPPARVPAVPFDLHFCRSSIMKPKRD

SEQ ID NO: 142 - protein, 26 aa, Homo sapiens
DLHFCRSSIMKPKRDGYMFLKAESKI

SEQ ID NO: 143 - protein, 33 aa, Homo sapiens; identical to SEQ ID NO: 71

SEQ ID NO: 144 - protein, 16 aa, Homo sapiens
FLKAESKIMFATLQRS

SEQ ID NO: 145 - protein, 16 aa, Homo sapiens
KPKRDGYMFLKAESKI

SEQ ID NO: 146 - protein, 23 aa, Homo sapiens
IFIITEYMANGSLLNYLREMRHR

SEQ ID NO: 147 - protein, 8 aa, Homo sapiens
ANGSLLNY

SEQ ID NO: 148 - protein, 9 aa, Homo sapiens
ANGSLLNYL

SEQ ID NO: 149 - protein, 10 aa, Homo sapiens
ANGSLLNYLR

SEQ ID NO: 150 - protein, 8 aa, Homo sapiens
EYMANGSL

SEQ ID NO: 151 - protein, 10 aa, Homo sapiens
EYMANGSLLN

SEQ ID NO: 152 - protein, 11 aa, Homo sapiens
EYMANGSLLNY

SEQ ID NO: 153 - protein, 8 aa, Homo sapiens
GSLLNYLR

SEQ ID NO: 154 - protein, 10 aa, Homo sapiens
GSLLNYLREM

SEQ ID NO: 155 - protein, 9 aa, Homo sapiens
ITEYMANGS

SEQ ID NO: 156 - protein, 10 aa, Homo sapiens
ITEYMANGSL

SEQ ID NO: 157 - protein, 11 aa, Homo sapiens
ITEYMANGSLL

SEQ ID NO: 158 - protein, 10 aa, Homo sapiens
MANGSLLNYL

SEQ ID NO: 159 - protein, 11 aa, Homo sapiens
MANGSLLNYLR

SEQ ID NO: 160 - protein, 8 aa, Homo sapiens
NGSLLNYL

SEQ ID NO: 161 - protein, 8 aa, Homo sapiens
NGSLLNYL

SEQ ID NO: 162 - protein, 10 aa, Homo sapiens
SLLNYLREMR

SEQ ID NO: 163 - protein, 10 aa, Homo sapiens
TEYMANGSLL

SEQ ID NO: 164 - protein, 12 aa, Homo sapiens
TEYMANGSLLNY

SEQ ID NO: 165 - protein, 8 aa, Homo sapiens
YMANGSLL

SEQ ID NO: 166 - protein, 9 aa, Homo sapiens
YMANGSLLN

SEQ ID NO: 167 - protein, 8 aa, Homo sapiens
ANGSLLNY

SEQ ID NO: 168 - protein, 9 aa, Homo sapiens
ANGSLLNYL

SEQ ID NO: 169 - protein, 10 aa, Homo sapiens
ANGSLLNYLR

SEQ ID NO: 170 - protein, 8 aa, Homo sapiens
EYMANGSL

SEQ ID NO: 171 - protein, 10 aa, Homo sapiens
EYMANGSLLN

SEQ ID NO: 172 - protein, 11 aa, Homo sapiens
EYMANGSLLNY

SEQ ID NO: 173 - protein, 8 aa, Homo sapiens
GSLLNYLR

SEQ ID NO: 174 - protein, 10 aa, Homo sapiens
GSLLNYLREM

SEQ ID NO: 175 - protein, 9 aa, Homo sapiens
ITEYMANGS

SEQ ID NO: 176 - protein, 10 aa, Homo sapiens
ITEYMANGSL

SEQ ID NO: 177 - protein, 11 aa, Homo sapiens
ITEYMANGSLL

SEQ ID NO: 178 - protein, 10 aa, Homo sapiens
MANGSLLNYL

SEQ ID NO: 179 - protein, 11 aa, Homo sapiens
MANGSLLNYLR

SEQ ID NO: 180 - protein, 8 aa, Homo sapiens
NGSLLNYL

SEQ ID NO: 181 - protein, 8 aa, Homo sapiens
NGSLLNYL

SEQ ID NO: 182 - protein, 10 aa, Homo sapiens
SLLNYLREMR

SEQ ID NO: 183 - protein, 10 aa, Homo sapiens
TEYMANGSLL

SEQ ID NO: 184 - protein, 12 aa, Homo sapiens
TEYMANGSLLNY

SEQ ID NO: 185 - protein, 8 aa, Homo sapiens
YMANGSLL

SEQ ID NO: 186 - protein, 9 aa, Homo sapiens
YMANGSLLN

SEQ ID NO: 187 - protein, 23 aa, Homo sapiens
IFIITEYMANGSLLNYLREMRHR

SEQ ID NO: 188 - protein, 10 aa, Artificial Sequence
  Description of Artificial Sequence: Synthetic peptide
IDIIMKIRNA

SEQ ID NO: 189 - protein, 30 aa, Artificial Sequence
  Description of Artificial Sequence: Synthetic polypeptide
FFFFFFFFFFFFFFFFFFFFIIFFIFFWMC

SEQ ID NO: 190 - protein, 30 aa, Artificial Sequence
  Description of Artificial Sequence: Synthetic polypeptide
FFFFFFFFFFFFFFFFFFFFFFFFAAFWFW

SEQ ID NO: 191 - protein, 30 aa, Artificial Sequence
  Description of Artificial Sequence: Synthetic polypeptide
IFFIFFIIFFFFFFFFFFFFIIIIIIIWEC

SEQ ID NO: 192 - protein, 30 aa, Artificial Sequence
  Description of Artificial Sequence: Synthetic polypeptide
FIFFFIIFFFFFIFFFFFIFIIIIIIFWEC

SEQ ID NO: 193 - protein, 8 aa, Artificial Sequence
  Description of Artificial Sequence: Synthetic peptide
WQAGILAR

SEQ ID NO: 194 - protein, 7 aa, Artificial Sequence
  Description of Artificial Sequence: Synthetic peptide
HSYTTAE

SEQ ID NO: 195 - protein, 8 aa, Artificial Sequence
  Description of Artificial Sequence: Synthetic peptide
PLTEEKIK

SEQ ID NO: 196 - protein, 10 aa, Artificial Sequence
  Description of Artificial Sequence: Synthetic peptide
GALHFKPGSR

SEQ ID NO: 197 - protein, 10 aa, Artificial Sequence
  Description of Artificial Sequence: Synthetic peptide
RRANKDATAE

SEQ ID NO: 198 - protein, 10 aa, Artificial Sequence
  Description of Artificial Sequence: Synthetic peptide
KAFISHEEKR

SEQ ID NO: 199 - protein, 10 aa, Artificial Sequence
  Description of Artificial Sequence: Synthetic peptide
TDLSSRFSKS

SEQ ID NO: 200 - protein, 10 aa, Artificial Sequence
  Description of Artificial Sequence: Synthetic peptide
FDLGGGTFDV

SEQ ID NO: 201 - protein, 10 aa, Artificial Sequence
  Description of Artificial Sequence: Synthetic peptide
CLLLHYSVSK

SEQ ID NO: 202 - protein, 9 aa, Artificial Sequence
  Description of Artificial Sequence: Synthetic peptide
MTEYKLVVV

SEQ ID NO: 203 - protein, 10 aa, Artificial Sequence
  Description of Artificial Sequence: Synthetic peptide
KKNKKDDIKD

SEQ ID NO: 204 - protein, 30 aa, Artificial Sequence
  Description of Artificial Sequence: Synthetic polypeptide
AGNDDDDDDDDDDDDDDDDDKKDKDDDDDD

SEQ ID NO: 205 - protein, 30 aa, Artificial Sequence
  Description of Artificial Sequence: Synthetic polypeptide
AGNKKKKKKKNNNNNNNNNNNNNNNNNNNN

SEQ ID NO: 206 - protein, 30 aa, Artificial Sequence
  Description of Artificial Sequence: Synthetic polypeptide
AGRDDDDDDDDDDDDDDDDDDDDDDDDDDD

SEQ ID NO: 207 - protein, 9 aa, Artificial Sequence
  Description of Artificial Sequence: Synthetic peptide
GKSALTIQL

SEQ ID NO: 208 - protein, 7 aa, Artificial Sequence
  Description of Artificial Sequence: Synthetic peptide
GKSALTI

SEQ ID NO: 209 - protein, 8 aa, Artificial Sequence
  Description of Artificial Sequence: Synthetic peptide
QGQNLKYQ

SEQ ID NO: 210 - protein, 8 aa, Artificial Sequence
  Description of Artificial Sequence: Synthetic peptide
ILGVLLLI

SEQ ID NO: 211 - protein, 8 aa, Artificial Sequence
  Description of Artificial Sequence: Synthetic peptide
EKEGKISK

SEQ ID NO: 212 - protein, 10 aa, Artificial Sequence
  Description of Artificial Sequence: Synthetic peptide
AASDFIFLVT

SEQ ID NO: 213 - protein, 10 aa, Artificial Sequence
  Description of Artificial Sequence: Synthetic peptide
KELKQVASPF

SEQ ID NO: 214 - protein, 10 aa, Artificial Sequence
  Description of Artificial Sequence: Synthetic peptide
KKKLINEKKE

SEQ ID NO: 215 - protein, 10 aa, Artificial Sequence
  Description of Artificial Sequence: Synthetic peptide
KKCDISLQFF

SEQ ID NO: 216 - protein, 10 aa, Artificial Sequence
  Description of Artificial Sequence: Synthetic peptide
KSTAGDTHLG

SEQ ID NO: 217 - protein, 10 aa, Artificial Sequence
  Description of Artificial Sequence: Synthetic peptide
ATFYVAVTVP

SEQ ID NO: 218 - protein, 30 aa, Artificial Sequence
  Description of Artificial Sequence: Synthetic polypeptide
LTIQLIQNHFVDEYDPTIEDSYRKQVVIDG

SEQ ID NO: 219 - protein, 30 aa, Artificial Sequence
  Description of Artificial Sequence: Synthetic polypeptide
TIQLIQNHFVDEYDPTIEDSYRKQVVIDGE

SEQ ID NO: 220 - protein, 8 aa, Homo sapiens
LIMQLMPF

SEQ ID NO: 221 - protein, 8 aa, Homo sapiens
TVQLIMQL

SEQ ID NO: 222 - protein, 10 aa, Homo sapiens
TSTVQLIMQL

SEQ ID NO: 223 - protein, 9 aa, Homo sapiens
TVQLIMQLM

SEQ ID NO: 224 - protein, 8 aa, Homo sapiens
VQLIMQLM

SEQ ID NO: 225 - protein, 9 aa, Homo sapiens
STVQLIMQL

SEQ ID NO: 226 - protein, 9 aa, Homo sapiens
LTSTVQLIM

SEQ ID NO: 227 - protein, 8 aa, Homo sapiens
LIMQLMPF

SEQ ID NO: 228 - protein, 8 aa, Homo sapiens
TVQLIMQL

SEQ ID NO: 229 - protein, 10 aa, Homo sapiens
TSTVQLIMQL

SEQ ID NO: 230 - protein, 9 aa, Homo sapiens
TVQLIMQLM

SEQ ID NO: 231 - protein, 8 aa, Homo sapiens
VQLIMQLM

SEQ ID NO: 232 - protein, 9 aa, Homo sapiens
STVQLIMQL

SEQ ID NO: 233 - protein, 9 aa, Homo sapiens
LTSTVQLIM

SEQ ID NO: 234 - protein, 9 aa, Homo sapiens
STVQLIMQL

SEQ ID NO: 235 - protein, 8 aa, Homo sapiens
LIMQLMPF

SEQ ID NO: 236 - protein, 9 aa, Homo sapiens
LTSTVQLIM

SEQ ID NO: 237 - protein, 8 aa, Homo sapiens
TVQLIMQL

SEQ ID NO: 238 - protein, 10 aa, Homo sapiens
TSTVQLIMQL

SEQ ID NO: 239 - protein, 9 aa, Homo sapiens
TVQLIMQLM

SEQ ID NO: 240 - protein, 8 aa, Homo sapiens
VQLIMQLM

SEQ ID NO: 241 - protein, 9 aa, Homo sapiens
STVQLIMQL

SEQ ID NO: 242 - protein, 8 aa, Homo sapiens
LIMQLMPF

SEQ ID NO: 243 - protein, 9 aa, Homo sapiens
LTSTVQLIM

SEQ ID NO: 244 - protein, 8 aa, Homo sapiens
TVQLIMQL

SEQ ID NO: 245 - protein, 10 aa, Homo sapiens
TSTVQLIMQL

SEQ ID NO: 246 - protein, 9 aa, Homo sapiens
TVQLIMQLM

SEQ ID NO: 247 - protein, 8 aa, Homo sapiens
VQLIMQLM

SEQ ID NO: 248 - protein, 10 aa, Artificial Sequence
  Description of Artificial Sequence: Synthetic peptide
IDIIMKIRNA

SEQ ID NO: 249 - protein, 30 aa, Artificial Sequence; identical to SEQ ID NO: 189
  Description of Artificial Sequence: Synthetic polypeptide

SEQ ID NO: 250 - protein, 30 aa, Artificial Sequence; identical to SEQ ID NO: 190
  Description of Artificial Sequence: Synthetic polypeptide

SEQ ID NO: 251 - protein, 30 aa, Artificial Sequence; identical to SEQ ID NO: 191
  Description of Artificial Sequence: Synthetic polypeptide

SEQ ID NO: 252 - protein, 30 aa, Artificial Sequence; identical to SEQ ID NO: 192
  Description of Artificial Sequence: Synthetic polypeptide

SEQ ID NO: 253 - protein, 8 aa, Artificial Sequence
  Description of Artificial Sequence: Synthetic peptide
WQAGILAR

SEQ ID NO: 254 - protein, 7 aa, Artificial Sequence
  Description of Artificial Sequence: Synthetic peptide
HSYTTAE

SEQ ID NO: 255 - protein, 8 aa, Artificial Sequence
  Description of Artificial Sequence: Synthetic peptide
PLTEEKIK

SEQ ID NO: 256 - protein, 10 aa, Artificial Sequence
  Description of Artificial Sequence: Synthetic peptide
GALHFKPGSR

SEQ ID NO: 257 - protein, 10 aa, Artificial Sequence
  Description of Artificial Sequence: Synthetic peptide
RRANKDATAE

SEQ ID NO: 258 - protein, 10 aa, Artificial Sequence
  Description of Artificial Sequence: Synthetic peptide
KAFISHEEKR

SEQ ID NO: 259 - protein, 10 aa, Artificial Sequence
  Description of Artificial Sequence: Synthetic peptide
TDLSSRFSKS

SEQ ID NO: 260 - protein, 10 aa, Artificial Sequence
  Description of Artificial Sequence: Synthetic peptide
FDLGGGTFDV

SEQ ID NO: 261 - protein, 10 aa, Artificial Sequence
  Description of Artificial Sequence: Synthetic peptide
CLLLHYSVSK

SEQ ID NO: 262 - protein, 9 aa, Artificial Sequence
  Description of Artificial Sequence: Synthetic peptide
MTEYKLVVV

SEQ ID NO: 263 - protein, 10 aa, Artificial Sequence
  Description of Artificial Sequence: Synthetic peptide
KKNKKDDIKD

SEQ ID NO: 264 - protein, 30 aa, Artificial Sequence; identical to SEQ ID NO: 204
  Description of Artificial Sequence: Synthetic polypeptide

SEQ ID NO: 265 - protein, 30 aa, Artificial Sequence; identical to SEQ ID NO: 205
  Description of Artificial Sequence: Synthetic polypeptide

SEQ ID NO: 266 - protein, 30 aa, Artificial Sequence; identical to SEQ ID NO: 206
  Description of Artificial Sequence: Synthetic polypeptide

SEQ ID NO: 267 - protein, 9 aa, Artificial Sequence
  Description of Artificial Sequence: Synthetic peptide
GKSALTIQL

SEQ ID NO: 268 - protein, 7 aa, Artificial Sequence
  Description of Artificial Sequence: Synthetic peptide
GKSALTI

SEQ ID NO: 269 - protein, 8 aa, Artificial Sequence
  Description of Artificial Sequence: Synthetic peptide
QGQNLKYQ

SEQ ID NO: 270 - protein, 8 aa, Artificial Sequence
  Description of Artificial Sequence: Synthetic peptide
ILGVLLLI

SEQ ID NO: 271 - protein, 8 aa, Artificial Sequence
  Description of Artificial Sequence: Synthetic peptide
EKEGKISK

SEQ ID NO: 272 - protein, 10 aa, Artificial Sequence
  Description of Artificial Sequence: Synthetic peptide
AASDFIFLVT

SEQ ID NO: 273 - protein, 10 aa, Artificial Sequence
  Description of Artificial Sequence: Synthetic peptide
KELKQVASPF

SEQ ID NO: 274 - protein, 10 aa, Artificial Sequence
  Description of Artificial Sequence: Synthetic peptide
KKKLINEKKE

SEQ ID NO: 275 - protein, 10 aa, Artificial Sequence
  Description of Artificial Sequence: Synthetic peptide
KKCDISLQFF

SEQ ID NO: 276 - protein, 10 aa, Artificial Sequence
  Description of Artificial Sequence: Synthetic peptide
KSTAGDTHLG

SEQ ID NO: 277 - protein, 10 aa, Artificial Sequence
  Description of Artificial Sequence: Synthetic peptide
ATFYVAVTVP

SEQ ID NO: 278 - protein, 30 aa, Artificial Sequence; identical to SEQ ID NO: 218
  Description of Artificial Sequence: Synthetic polypeptide

SEQ ID NO: 279 - protein, 30 aa, Artificial Sequence; identical to SEQ ID NO: 219
  Description of Artificial Sequence: Synthetic polypeptide

SEQ ID NO: 280 - protein, 8 aa, Homo sapiens
LIMQLMPF

SEQ ID NO: 281 - protein, 9 aa, Homo sapiens
LTSTVQLIM

SEQ ID NO: 282 - protein, 9 aa, Homo sapiens
QLIMQLMPF

SEQ ID NO: 283 - protein, 9 aa, Homo sapiens
STVQLIMQL

SEQ ID NO: 284 - protein, 10 aa, Homo sapiens
STVQLIMQLM

SEQ ID NO: 285 - protein, 10 aa, Homo sapiens
TSTVQLIMQL

SEQ ID NO: 286 - protein, 8 aa, Homo sapiens
TVQLIMQL

SEQ ID NO: 287 - protein, 9 aa, Homo sapiens
TVQLIMQLM

SEQ ID NO: 288 - protein, 8 aa, Homo sapiens
VQLIMQLM

SEQ ID NO: 289 - protein, 10 aa, Homo sapiens
STVQLIMQLM

SEQ ID NO: 290 - protein, 9 aa, Homo sapiens
QLIMQLMPF

SEQ ID NO: 291 - protein, 10 aa, Homo sapiens
STVQLIMQLM

SEQ ID NO: 292 - protein, 9 aa, Homo sapiens
QLIMQLMPF

SEQ ID NO: 293 - protein, 10 aa, Homo sapiens
SMLTGPPARV

SEQ ID NO: 294 - protein, 9 aa, Homo sapiens
MLTGPPARV

SEQ ID NO: 295 - protein, 9 aa, Homo sapiens
KPKRDGYMF

SEQ ID NO: 296 - protein, 10 aa, Homo sapiens
KPKRDGYMFL

SEQ ID NO: 297 - protein, 9 aa, Homo sapiens
ESKIMFATL

SEQ ID NO: 298 - protein, 14 aa, Homo sapiens
ESKIMFATLQRSSL

SEQ ID NO: 299 - protein, 16 aa, Homo sapiens
KPKRDGYMFLKAESKI

SEQ ID NO: 300 - protein, 18 aa, Homo sapiens
SMLTGPPARVPAVPFDLH

SEQ ID NO: 301 - protein, 21 aa, Homo sapiens
EPCSMLTGPPARVPAVPFDLH

SEQ ID NO: 302 - protein, 25 aa, Homo sapiens
LHFCRSSIMKPKRDGYMFLKAESKI

SEQ ID NO: 303 - protein, 26 aa, Homo sapiens
GPPARVPAVPFDLHFCRSSIMKPKRD

SEQ ID NO: 304 - protein, 33 aa, Homo sapiens; identical to SEQ ID NO: 71

SEQ ID NO: 305 - protein, 8 aa, Homo sapiens
EPCSMLTG

SEQ ID NO: 306 - protein, 8 aa, Homo sapiens
PCSMLTGP

SEQ ID NO: 307 - protein, 8 aa, Homo sapiens
CSMLTGPP

SEQ ID NO: 308 - protein, 8 aa, Homo sapiens
SMLTGPPA

SEQ ID NO: 309 - protein, 8 aa, Homo sapiens
MLTGPPAR

SEQ ID NO: 310 - protein, 8 aa, Homo sapiens
LTGPPARV

SEQ ID NO: 311 - protein, 8 aa, Homo sapiens
TGPPARVP

SEQ ID NO: 312 - protein, 8 aa, Homo sapiens
GPPARVPA

SEQ ID NO: 313 - protein, 8 aa, Homo sapiens
PPARVPAV

SEQ ID NO: 314 - protein, 8 aa, Homo sapiens
PARVPAVP

SEQ ID NO: 315 - protein, 8 aa, Homo sapiens
ARVPAVPF

SEQ ID NO: 316 - protein, 8 aa, Homo sapiens
RVPAVPFD

SEQ ID NO: 317 - protein, 8 aa, Homo sapiens
VPAVPFDL

SEQ ID NO: 318 - protein, 8 aa, Homo sapiens
PAVPFDLH

SEQ ID NO: 319 - protein, 8 aa, Homo sapiens
AVPFDLHF

SEQ ID NO: 320 - protein, 8 aa, Homo sapiens
VPFDLHFC

SEQ ID NO: 321 - protein, 8 aa, Homo sapiens
PFDLHFCR

SEQ ID NO: 322 - protein, 8 aa, Homo sapiens
FDLHFCRS

SEQ ID NO: 323 - protein, 8 aa, Homo sapiens
DLHFCRSS

SEQ ID NO: 324 - protein, 8 aa, Homo sapiens
LHFCRSSI

SEQ ID NO: 325 - protein, 8 aa, Homo sapiens
HFCRSSIM

SEQ ID NO: 326 - protein, 8 aa, Homo sapiens
FCRSSIMK

SEQ ID NO: 327 - protein, 8 aa, Homo sapiens
CRSSIMKP

SEQ ID NO: 328 - protein, 8 aa, Homo sapiens
RSSIMKPK

SEQ ID NO: 329 - protein, 8 aa, Homo sapiens
SSIMKPKR

SEQ ID NO: 330 - protein, 8 aa, Homo sapiens
SIMKPKRD

SEQ ID NO: 331 - protein, 8 aa, Homo sapiens
IMKPKRDG

SEQ ID NO: 332 - protein, 8 aa, Homo sapiens
MKPKRDGY

SEQ ID NO: 333 - protein, 8 aa, Homo sapiens
KPKRDGYM

SEQ ID NO: 334 - protein, 8 aa, Homo sapiens
PKRDGYMF

SEQ ID NO: 335 - protein, 8 aa, Homo sapiens
KRDGYMFL

SEQ ID NO: 336 - protein, 8 aa, Homo sapiens
RDGYMFLK

SEQ ID NO: 337 - protein, 8 aa, Homo sapiens
DGYMFLKA

SEQ ID NO: 338 - protein, 8 aa, Homo sapiens
GYMFLKAE

SEQ ID NO: 339 - protein, 8 aa, Homo sapiens
YMFLKAES

SEQ ID NO: 340 - protein, 8 aa, Homo sapiens
MFLKAESK

SEQ ID NO: 341 - protein, 8 aa, Homo sapiens
FLKAESKI

SEQ ID NO: 342 - protein, 8 aa, Homo sapiens
LKAESKIM

SEQ ID NO: 343 - protein, 8 aa, Homo sapiens
KAESKIMF

SEQ ID NO: 344 - protein, 8 aa, Homo sapiens
AESKIMFA

SEQ ID NO: 345 - protein, 8 aa, Homo sapiens
ESKIMFAT

SEQ ID NO: 346 - protein, 8 aa, Homo sapiens
SKIMFATL

SEQ ID NO: 347 - protein, 8 aa, Homo sapiens
KIMFATLQ

SEQ ID NO: 348 - protein, 8 aa, Homo sapiens
IMFATLQR

SEQ ID NO: 349 - protein, 8 aa, Homo sapiens
MFATLQRS

SEQ ID NO: 350 - protein, 8 aa, Homo sapiens
FATLQRSS

SEQ ID NO: 351 - protein, 8 aa, Homo sapiens
ATLQRSSL

SEQ ID NO: 352 - protein, 8 aa, Homo sapiens
TLQRSSLW

SEQ ID NO: 353 - protein, 8 aa, Homo sapiens
LQRSSLWC

SEQ ID NO: 354 - protein, 8 aa, Homo sapiens
QRSSLWCL

SEQ ID NO: 355 - protein, 8 aa, Homo sapiens
RSSLWCLC

SEQ ID NO: 356 - protein, 8 aa, Homo sapiens
SSLWCLCS

SEQ ID NO: 357 - protein, 8 aa, Homo sapiens
SLWCLCSN

SEQ ID NO: 358 - protein, 9 aa, Homo sapiens
EPCSMLTGP

SEQ ID NO: 359 - protein, 9 aa, Homo sapiens
PCSMLTGPP

SEQ ID NO: 360 - protein, 9 aa, Homo sapiens
CSMLTGPPA

SEQ ID NO: 361 - protein, 9 aa, Homo sapiens
SMLTGPPAR

SEQ ID NO: 362 - protein, 9 aa, Homo sapiens
MLTGPPARV

SEQ ID NO: 363 - protein, 9 aa, Homo sapiens
LTGPPARVP

SEQ ID NO: 364 - protein, 9 aa, Homo sapiens
TGPPARVPA

SEQ ID NO: 365 - protein, 9 aa, Homo sapiens
GPPARVPAV

SEQ ID NO: 366 - protein, 9 aa, Homo sapiens
PPARVPAVP

SEQ ID NO: 367 - protein, 9 aa, Homo sapiens
PARVPAVPF

SEQ ID NO: 368 - protein, 9 aa, Homo sapiens
ARVPAVPFD

SEQ ID NO: 369 - protein, 9 aa, Homo sapiens
RVPAVPFDL

SEQ ID NO: 370 - protein, 9 aa, Homo sapiens
VPAVPFDLH

SEQ ID NO: 371 - protein, 9 aa, Homo sapiens
PAVPFDLHF

SEQ ID NO: 372 - protein, 9 aa, Homo sapiens
AVPFDLHFC

SEQ ID NO: 373 - protein, 9 aa, Homo sapiens
VPFDLHFCR

SEQ ID NO: 374 - protein, 9 aa, Homo sapiens
PFDLHFCRS

SEQ ID NO: 375 - protein, 9 aa, Homo sapiens
FDLHFCRSS

SEQ ID NO: 376 - protein, 9 aa, Homo sapiens
DLHFCRSSI

SEQ ID NO: 377 - protein, 9 aa, Homo sapiens
LHFCRSSIM

SEQ ID NO: 378 - protein, 9 aa, Homo sapiens
HFCRSSIMK

SEQ ID NO: 379 - protein, 9 aa, Homo sapiens
FCRSSIMKP

SEQ ID NO: 380 - protein, 9 aa, Homo sapiens
CRSSIMKPK

SEQ ID NO: 381 - protein, 9 aa, Homo sapiens
RSSIMKPKR

SEQ ID NO: 382 - protein, 9 aa, Homo sapiens
SSIMKPKRD

SEQ ID NO: 383 - protein, 9 aa, Homo sapiens
SIMKPKRDG

SEQ ID NO: 384 - protein, 9 aa, Homo sapiens
IMKPKRDGY

SEQ ID NO: 385 - protein, 9 aa, Homo sapiens
MKPKRDGYM

SEQ ID NO: 386 - protein, 9 aa, Homo sapiens
KPKRDGYMF

SEQ ID NO: 387 - protein, 9 aa, Homo sapiens
PKRDGYMFL

SEQ ID NO: 388 - protein, 9 aa, Homo sapiens
KRDGYMFLK

SEQ ID NO: 389 - protein, 9 aa, Homo sapiens
RDGYMFLKA

SEQ ID NO: 390 - protein, 9 aa, Homo sapiens
DGYMFLKAE

SEQ ID NO: 391 - protein, 9 aa, Homo sapiens
GYMFLKAES

SEQ ID NO: 392 - protein, 9 aa, Homo sapiens
YMFLKAESK

SEQ ID NO: 393 - protein, 9 aa, Homo sapiens
MFLKAESKI

SEQ ID NO: 394 - protein, 9 aa, Homo sapiens
FLKAESKIM

SEQ ID NO: 395 - protein, 9 aa, Homo sapiens
LKAESKIMF

SEQ ID NO: 396 - protein, 9 aa, Homo sapiens
KAESKIMFA

SEQ ID NO: 397 - protein, 9 aa, Homo sapiens
AESKIMFAT

SEQ ID NO: 398 - protein, 9 aa, Homo sapiens
ESKIMFATL

SEQ ID NO: 399 - protein, 9 aa, Homo sapiens
SKIMFATLQ

SEQ ID NO: 400 - protein, 9 aa, Homo sapiens
KIMFATLQR

SEQ ID NO: 401 - protein, 9 aa, Homo sapiens
IMFATLQRS

SEQ ID NO: 402 - protein, 9 aa, Homo sapiens
MFATLQRSS

SEQ ID NO: 403 - protein, 9 aa, Homo sapiens
FATLQRSSL

SEQ ID NO: 404 - protein, 9 aa, Homo sapiens
ATLQRSSLW

SEQ ID NO: 405 - protein, 9 aa, Homo sapiens
TLQRSSLWC

SEQ ID NO: 406 - protein, 9 aa, Homo sapiens
LQRSSLWCL

SEQ ID NO: 407 - protein, 9 aa, Homo sapiens
QRSSLWCLC

SEQ ID NO: 408 - protein, 9 aa, Homo sapiens
RSSLWCLCS

SEQ ID NO: 409 - protein, 9 aa, Homo sapiens
SSLWCLCSN

SEQ ID NO: 410 - protein, 9 aa, Homo sapiens
SLWCLCSNH

SEQ ID NO: 411 - protein, 10 aa, Homo sapiens
EPCSMLTGPP

SEQ ID NO: 412 - protein, 10 aa, Homo sapiens
PCSMLTGPPA

SEQ ID NO: 413 - protein, 10 aa, Homo sapiens
CSMLTGPPAR

SEQ ID NO: 414 - protein, 10 aa, Homo sapiens
SMLTGPPARV

SEQ ID NO: 415 - protein, 10 aa, Homo sapiens
MLTGPPARVP

SEQ ID NO: 416 - protein, 10 aa, Homo sapiens
LTGPPARVPA

SEQ ID NO: 417 - protein, 10 aa, Homo sapiens
TGPPARVPAV

SEQ ID NO: 418 - protein, 10 aa, Homo sapiens
GPPARVPAVP

SEQ ID NO: 419 - protein, 10 aa, Homo sapiens
PPARVPAVPF

SEQ ID NO: 420 - protein, 10 aa, Homo sapiens
PARVPAVPFD

SEQ ID NO: 421 - protein, 10 aa, Homo sapiens
ARVPAVPFDL

SEQ ID NO: 422 - protein, 10 aa, Homo sapiens
RVPAVPFDLH

SEQ ID NO: 423 - protein, 10 aa, Homo sapiens
VPAVPFDLHF

SEQ ID NO: 424 - protein, 10 aa, Homo sapiens
PAVPFDLHFC

SEQ ID NO: 425 - protein, 10 aa, Homo sapiens
AVPFDLHFCR

SEQ ID NO: 426 - protein, 10 aa, Homo sapiens
VPFDLHFCRS

SEQ ID NO: 427 - protein, 10 aa, Homo sapiens
PFDLHFCRSS

SEQ ID NO: 428 - protein, 10 aa, Homo sapiens
FDLHFCRSSI

SEQ ID NO: 429 - protein, 10 aa, Homo sapiens
DLHFCRSSIM

SEQ ID NO: 430 - protein, 10 aa, Homo sapiens
LHFCRSSIMK

SEQ ID NO: 431 - protein, 10 aa, Homo sapiens
HFCRSSIMKP

SEQ ID NO: 432 - protein, 10 aa, Homo sapiens
FCRSSIMKPK

SEQ ID NO: 433 - protein, 10 aa, Homo sapiens
CRSSIMKPKR

SEQ ID NO: 434 - protein, 10 aa, Homo sapiens
RSSIMKPKRD

SEQ ID NO: 435 - protein, 10 aa, Homo sapiens
SSIMKPKRDG

SEQ ID NO: 436 - protein, 10 aa, Homo sapiens
SIMKPKRDGY

SEQ ID NO: 437 - protein, 10 aa, Homo sapiens
IMKPKRDGYM

SEQ ID NO: 438 - protein, 10 aa, Homo sapiens
MKPKRDGYMF

SEQ ID NO: 439 - protein, 10 aa, Homo sapiens
KPKRDGYMFL

SEQ ID NO: 440 - protein, 10 aa, Homo sapiens
PKRDGYMFLK

SEQ ID NO: 441 - protein, 10 aa, Homo sapiens
KRDGYMFLKA

SEQ ID NO: 442 - protein, 10 aa, Homo sapiens
RDGYMFLKAE

SEQ ID NO: 443 - protein, 10 aa, Homo sapiens
DGYMFLKAES

SEQ ID NO: 444 - protein, 10 aa, Homo sapiens
GYMFLKAESK

SEQ ID NO: 445 - protein, 10 aa, Homo sapiens
YMFLKAESKI

SEQ ID NO: 446 - protein, 10 aa, Homo sapiens
MFLKAESKIM

SEQ ID NO: 447 - protein, 10 aa, Homo sapiens
FLKAESKIMF

SEQ ID NO: 448 - protein, 10 aa, Homo sapiens
LKAESKIMFA

SEQ ID NO: 449 - protein, 10 aa, Homo sapiens
KAESKIMFAT

SEQ ID NO: 450 - protein, 10 aa, Homo sapiens
AESKIMFATL

SEQ ID NO: 451 - protein, 10 aa, Homo sapiens
ESKIMFATLQ

SEQ ID NO: 452 - protein, 10 aa, Homo sapiens
SKIMFATLQR

SEQ ID NO: 453 - protein, 10 aa, Homo sapiens
KIMFATLQRS

SEQ ID NO: 454 - protein, 10 aa, Homo sapiens
IMFATLQRSS

SEQ ID NO: 455 - protein, 10 aa, Homo sapiens
MFATLQRSSL

SEQ ID NO: 456 - protein, 10 aa, Homo sapiens
FATLQRSSLW

SEQ ID NO: 457 - protein, 10 aa, Homo sapiens
ATLQRSSLWC

SEQ ID NO: 458 - protein, 10 aa, Homo sapiens
TLQRSSLWCL

SEQ ID NO: 459 - protein, 10 aa, Homo sapiens
LQRSSLWCLC

SEQ ID NO: 460 - protein, 10 aa, Homo sapiens
QRSSLWCLCS

SEQ ID NO: 461 - protein, 10 aa, Homo sapiens
RSSLWCLCSN

SEQ ID NO: 462 - protein, 10 aa, Homo sapiens
SSLWCLCSNH

SEQ ID NO: 463 - protein, 9 aa, Homo sapiens
SLWCLCSNH

SEQ ID NO: 464 - protein, 11 aa, Homo sapiens
EPCSMLTGPPA

SEQ ID NO: 465 - protein, 11 aa, Homo sapiens
PCSMLTGPPAR

SEQ ID NO: 466 - protein, 11 aa, Homo sapiens
CSMLTGPPARV

SEQ ID NO: 467 - protein, 11 aa, Homo sapiens
SMLTGPPARVP

SEQ ID NO: 468 - protein, 11 aa, Homo sapiens
MLTGPPARVPA

SEQ ID NO: 469 - protein, 11 aa, Homo sapiens
LTGPPARVPAV

SEQ ID NO: 470 - protein, 11 aa, Homo sapiens
TGPPARVPAVP

SEQ ID NO: 471 - protein, 11 aa, Homo sapiens
GPPARVPAVPF

SEQ ID NO: 472 - protein, 11 aa, Homo sapiens
PPARVPAVPFD

SEQ ID NO: 473 - protein, 11 aa, Homo sapiens
PARVPAVPFDL

SEQ ID NO: 474 - protein, 11 aa, Homo sapiens
ARVPAVPFDLH

SEQ ID NO: 475 - protein, 11 aa, Homo sapiens
RVPAVPFDLHF

SEQ ID NO: 476 - protein, 11 aa, Homo sapiens
VPAVPFDLHFC

SEQ ID NO: 477 - protein, 11 aa, Homo sapiens
PAVPFDLHFCR

SEQ ID NO: 478 - protein, 11 aa, Homo sapiens
AVPFDLHFCRS

SEQ ID NO: 479 - protein, 11 aa, Homo sapiens
VPFDLHFCRSS

SEQ ID NO: 480 - protein, 11 aa, Homo sapiens
PFDLHFCRSSI

SEQ ID NO: 481 - protein, 11 aa, Homo sapiens
FDLHFCRSSIM

SEQ ID NO: 482 - protein, 11 aa, Homo sapiens
DLHFCRSSIMK

SEQ ID NO: 483 - protein, 11 aa, Homo sapiens
LHFCRSSIMKP

SEQ ID NO: 484 - protein, 11 aa, Homo sapiens
HFCRSSIMKPK

SEQ ID NO: 485 - protein, 11 aa, Homo sapiens
FCRSSIMKPKR

SEQ ID NO: 486 - protein, 11 aa, Homo sapiens
CRSSIMKPKRD

SEQ ID NO: 487 - protein, 11 aa, Homo sapiens
RSSIMKPKRDG

SEQ ID NO: 488 - protein, 11 aa, Homo sapiens
SSIMKPKRDGY

SEQ ID NO: 489 - protein, 11 aa, Homo sapiens
SIMKPKRDGYM

SEQ ID NO: 490 - protein, 11 aa, Homo sapiens
IMKPKRDGYMF

SEQ ID NO: 491 - protein, 11 aa, Homo sapiens
MKPKRDGYMFL

SEQ ID NO: 492 - protein, 11 aa, Homo sapiens
KPKRDGYMFLK

SEQ ID NO: 493 - protein, 11 aa, Homo sapiens
PKRDGYMFLKA

SEQ ID NO: 494 - protein, 11 aa, Homo sapiens
KRDGYMFLKAE

SEQ ID NO: 495 - protein, 11 aa, Homo sapiens
RDGYMFLKAES

SEQ ID NO: 496 - protein, 11 aa, Homo sapiens
DGYMFLKAESK

SEQ ID NO: 497 - protein, 11 aa, Homo sapiens
GYMFLKAESKI

SEQ ID NO: 498 - protein, 11 aa, Homo sapiens
YMFLKAESKIM

SEQ ID NO: 499 - protein, 11 aa, Homo sapiens
MFLKAESKIMF

SEQ ID NO: 500 - protein, 11 aa, Homo sapiens
FLKAESKIMFA

SEQ ID NO: 501 - protein, 11 aa, Homo sapiens
LKAESKIMFAT

SEQ ID NO: 502 - protein, 11 aa, Homo sapiens
KAESKIMFATL

SEQ ID NO: 503 - protein, 11 aa, Homo sapiens
AESKIMFATLQ

SEQ ID NO: 504 - protein, 11 aa, Homo sapiens
ESKIMFATLQR

SEQ ID NO: 505 - protein, 11 aa, Homo sapiens
SKIMFATLQRS

SEQ ID NO: 506 - protein, 11 aa, Homo sapiens
KIMFATLQRSS

SEQ ID NO: 507 - protein, 11 aa, Homo sapiens
IMFATLQRSSL

SEQ ID NO: 508 - protein, 11 aa, Homo sapiens
MFATLQRSSLW

SEQ ID NO: 509 - protein, 11 aa, Homo sapiens
FATLQRSSLWC

SEQ ID NO: 510 - protein, 11 aa, Homo sapiens
ATLQRSSLWCL

SEQ ID NO: 511 - protein, 11 aa, Homo sapiens
TLQRSSLWCLC

SEQ ID NO: 512 - protein, 11 aa, Homo sapiens
LQRSSLWCLCS

SEQ ID NO: 513 - protein, 11 aa, Homo sapiens
QRSSLWCLCSN

SEQ ID NO: 514 - protein, 11 aa, Homo sapiens
RSSLWCLCSNH

SEQ ID NO: 515 - protein, 12 aa, Homo sapiens
EPCSMLTGPPAR

SEQ ID NO: 516 - protein, 12 aa, Homo sapiens
PCSMLTGPPARV

SEQ ID NO: 517 - protein, 12 aa, Homo sapiens
CSMLTGPPARVP

SEQ ID NO: 518 - protein, 12 aa, Homo sapiens
SMLTGPPARVPA

SEQ ID NO: 519 - protein, 12 aa, Homo sapiens
MLTGPPARVPAV

SEQ ID NO: 520 - protein, 12 aa, Homo sapiens
LTGPPARVPAVP

SEQ ID NO: 521 - protein, 12 aa, Homo sapiens
TGPPARVPAVPF

SEQ ID NO: 522 - protein, 12 aa, Homo sapiens
GPPARVPAVPFD

SEQ ID NO: 523 - protein, 12 aa, Homo sapiens
PPARVPAVPFDL

SEQ ID NO: 524 - protein, 12 aa, Homo sapiens
PARVPAVPFDLH

SEQ ID NO: 525 - protein, 12 aa, Homo sapiens
ARVPAVPFDLHF

SEQ ID NO: 526 - protein, 12 aa, Homo sapiens
RVPAVPFDLHFC

SEQ ID NO: 527 - protein, 12 aa, Homo sapiens
VPAVPFDLHFCR

SEQ ID NO: 528 - protein, 12 aa, Homo sapiens
PAVPFDLHFCRS

SEQ ID NO: 529 - protein, 12 aa, Homo sapiens
AVPFDLHFCRSS

SEQ ID NO: 530 - protein, 12 aa, Homo sapiens
VPFDLHFCRSSI

SEQ ID NO: 531 - protein, 12 aa, Homo sapiens
PFDLHFCRSSIM

SEQ ID NO: 532 - protein, 12 aa, Homo sapiens
FDLHFCRSSIMK

SEQ ID NO: 533 - protein, 12 aa, Homo sapiens
DLHFCRSSIMKP

SEQ ID NO: 534 - protein, 12 aa, Homo sapiens
LHFCRSSIMKPK

SEQ ID NO: 535 - protein, 12 aa, Homo sapiens
HFCRSSIMKPKR

SEQ ID NO: 536 - protein, 12 aa, Homo sapiens
FCRSSIMKPKRD

SEQ ID NO: 537 - protein, 12 aa, Homo sapiens
CRSSIMKPKRDG

SEQ ID NO: 538 - protein, 12 aa, Homo sapiens
RSSIMKPKRDGY

SEQ ID NO: 539 - protein, 12 aa, Homo sapiens
SSIMKPKRDGYM

SEQ ID NO: 540 - protein, 12 aa, Homo sapiens
SIMKPKRDGYMF

SEQ ID NO: 541 - protein, 12 aa, Homo sapiens
IMKPKRDGYMFL

SEQ ID NO: 542 - protein, 12 aa, Homo sapiens
MKPKRDGYMFLK

SEQ ID NO: 543 - protein, 12 aa, Homo sapiens
KPKRDGYMFLKA

SEQ ID NO: 544 - protein, 12 aa, Homo sapiens
PKRDGYMFLKAE

SEQ ID NO: 545 - protein, 12 aa, Homo sapiens
KRDGYMFLKAES

SEQ ID NO: 546 - protein, 12 aa, Homo sapiens
RDGYMFLKAESK

SEQ ID NO: 547 - protein, 12 aa, Homo sapiens
DGYMFLKAESKI

SEQ ID NO: 548 - protein, 12 aa, Homo sapiens
GYMFLKAESKIM

SEQ ID NO: 549 - protein, 12 aa, Homo sapiens
YMFLKAESKIMF

SEQ ID NO: 550 - protein, 12 aa, Homo sapiens
MFLKAESKIMFA

SEQ ID NO: 551 - protein, 12 aa, Homo sapiens
FLKAESKIMFAT

SEQ ID NO: 552 - protein, 12 aa, Homo sapiens
LKAESKIMFATL

SEQ ID NO: 553 - protein, 12 aa, Homo sapiens
KAESKIMFATLQ

SEQ ID NO: 554 - protein, 12 aa, Homo sapiens
AESKIMFATLQR

SEQ ID NO: 555 - protein, 12 aa, Homo sapiens
ESKIMFATLQRS

SEQ ID NO: 556 - protein, 12 aa, Homo sapiens
SKIMFATLQRSS

SEQ ID NO: 557 - protein, 12 aa, Homo sapiens
KIMFATLQRSSL

SEQ ID NO: 558 - protein, 12 aa, Homo sapiens
IMFATLQRSSLW

SEQ ID NO: 559 - protein, 12 aa, Homo sapiens
MFATLQRSSLWC

SEQ ID NO: 560 - protein, 12 aa, Homo sapiens
FATLQRSSLWCL

SEQ ID NO: 561 - protein, 12 aa, Homo sapiens
ATLQRSSLWCLC

SEQ ID NO: 562 - protein, 12 aa, Homo sapiens
TLQRSSLWCLCS

SEQ ID NO: 563 - protein, 12 aa, Homo sapiens
LQRSSLWCLCSN

SEQ ID NO: 564 - protein, 12 aa, Homo sapiens
QRSSLWCLCSNH

SEQ ID NO: 565 - protein, 13 aa, Homo sapiens
EPCSMLTGPPARV

SEQ ID NO: 566 - protein, 13 aa, Homo sapiens
PCSMLTGPPARVP

SEQ ID NO: 567 - protein, 13 aa, Homo sapiens
CSMLTGPPARVPA

SEQ ID NO: 568 - protein, 13 aa, Homo sapiens
SMLTGPPARVPAV

SEQ ID NO: 569 - protein, 13 aa, Homo sapiens
MLTGPPARVPAVP

SEQ ID NO: 570 - protein, 13 aa, Homo sapiens
LTGPPARVPAVPF

SEQ ID NO: 571 - protein, 13 aa, Homo sapiens
TGPPARVPAVPFD

SEQ ID NO: 572 - protein, 13 aa, Homo sapiens
GPPARVPAVPFDL

SEQ ID NO: 573 - protein, 13 aa, Homo sapiens
PPARVPAVPFDLH

SEQ ID NO: 574 - protein, 13 aa, Homo sapiens
PARVPAVPFDLHF

SEQ ID NO: 575 - protein, 13 aa, Homo sapiens
ARVPAVPFDLHFC

SEQ ID NO: 576 - protein, 13 aa, Homo sapiens
RVPAVPFDLHFCR

SEQ ID NO: 577 - protein, 13 aa, Homo sapiens
VPAVPFDLHFCRS

SEQ ID NO: 578 - protein, 13 aa, Homo sapiens
PAVPFDLHFCRSS

SEQ ID NO: 579 - protein, 13 aa, Homo sapiens
AVPFDLHFCRSSI

SEQ ID NO: 580 - protein, 13 aa, Homo sapiens
VPFDLHFCRSSIM

SEQ ID NO: 581 - protein, 13 aa, Homo sapiens
PFDLHFCRSSIMK

SEQ ID NO: 582 - protein, 13 aa, Homo sapiens
FDLHFCRSSIMKP

SEQ ID NO: 583 - protein, 13 aa, Homo sapiens
DLHFCRSSIMKPK

SEQ ID NO: 584 - protein, 13 aa, Homo sapiens
LHFCRSSIMKPKR

SEQ ID NO: 585 - protein, 13 aa, Homo sapiens
HFCRSSIMKPKRD

SEQ ID NO: 586 - protein, 13 aa, Homo sapiens
FCRSSIMKPKRDG

SEQ ID NO: 587 - protein, 13 aa, Homo sapiens
CRSSIMKPKRDGY

SEQ ID NO: 588 - protein, 13 aa, Homo sapiens
RSSIMKPKRDGYM

SEQ ID NO: 589 - protein, 13 aa, Homo sapiens
SSIMKPKRDGYMF

SEQ ID NO: 590 - protein, 13 aa, Homo sapiens
SIMKPKRDGYMFL

SEQ ID NO: 591 - protein, 13 aa, Homo sapiens
IMKPKRDGYMFLK

SEQ ID NO: 592 - protein, 13 aa, Homo sapiens
MKPKRDGYMFLKA

SEQ ID NO: 593 - protein, 13 aa, Homo sapiens
KPKRDGYMFLKAE

SEQ ID NO: 594 - protein, 13 aa, Homo sapiens
PKRDGYMFLKAES

SEQ ID NO: 595 - protein, 13 aa, Homo sapiens
KRDGYMFLKAESK

SEQ ID NO: 596 - protein, 13 aa, Homo sapiens
RDGYMFLKAESKI

SEQ ID NO: 597 - protein, 13 aa, Homo sapiens
DGYMFLKAESKIM

SEQ ID NO: 598 - protein, 13 aa, Homo sapiens
GYMFLKAESKIMF

SEQ ID NO: 599 - protein, 13 aa, Homo sapiens
YMFLKAESKIMFA

SEQ ID NO: 600 - protein, 13 aa, Homo sapiens
MFLKAESKIMFAT

SEQ ID NO: 601 - protein, 13 aa, Homo sapiens
FLKAESKIMFATL

SEQ ID NO: 602 - protein, 13 aa, Homo sapiens
LKAESKIMFATLQ

SEQ ID NO: 603 - protein, 13 aa, Homo sapiens
KAESKIMFATLQR

SEQ ID NO: 604 - protein, 13 aa, Homo sapiens
AESKIMFATLQRS

SEQ ID NO: 605 - protein, 13 aa, Homo sapiens
ESKIMFATLQRSS

SEQ ID NO: 606 - protein, 13 aa, Homo sapiens
SKIMFATLQRSSL

SEQ ID NO: 607 - protein, 13 aa, Homo sapiens
KIMFATLQRSSLW

SEQ ID NO: 608 - protein, 13 aa, Homo sapiens
IMFATLQRSSLWC

SEQ ID NO: 609 - protein, 13 aa, Homo sapiens
MFATLQRSSLWCL

SEQ ID NO: 610 - protein, 13 aa, Homo sapiens
FATLQRSSLWCLC

SEQ ID NO: 611 - protein, 13 aa, Homo sapiens
ATLQRSSLWCLCS

SEQ ID NO: 612 - protein, 13 aa, Homo sapiens
TLQRSSLWCLCSN

SEQ ID NO: 613 - protein, 13 aa, Homo sapiens
LQRSSLWCLCSNH

SEQ ID NO: 614 - protein, 14 aa, Homo sapiens
EPCSMLTGPPARVP

SEQ ID NO: 615 - protein, 14 aa, Homo sapiens
PCSMLTGPPARVPA

SEQ ID NO: 616 - protein, 14 aa, Homo sapiens
CSMLTGPPARVPAV

SEQ ID NO: 617 - protein, 14 aa, Homo sapiens
SMLTGPPARVPAVP

SEQ ID NO: 618 - protein, 14 aa, Homo sapiens
MLTGPPARVPAVPF

SEQ ID NO: 619 - protein, 14 aa, Homo sapiens
LTGPPARVPAVPFD

SEQ ID NO: 620 - protein, 14 aa, Homo sapiens
TGPPARVPAVPFDL

SEQ ID NO: 621 - protein, 14 aa, Homo sapiens
GPPARVPAVPFDLH

SEQ ID NO: 622 - protein, 14 aa, Homo sapiens
PPARVPAVPFDLHF

SEQ ID NO: 623 - protein, 14 aa, Homo sapiens
PARVPAVPFDLHFC

SEQ ID NO: 624 - protein, 14 aa, Homo sapiens
ARVPAVPFDLHFCR

SEQ ID NO: 625 - protein, 14 aa, Homo sapiens
RVPAVPFDLHFCRS

SEQ ID NO: 626 - protein, 14 aa, Homo sapiens
VPAVPFDLHFCRSS

SEQ ID NO: 627 - protein, 14 aa, Homo sapiens
PAVPFDLHFCRSSI

SEQ ID NO: 628 - protein, 14 aa, Homo sapiens
AVPFDLHFCRSSIM

SEQ ID NO: 629 - protein, 14 aa, Homo sapiens
VPFDLHFCRSSIMK

SEQ ID NO: 630 - protein, 14 aa, Homo sapiens
PFDLHFCRSSIMKP

SEQ ID NO: 631 - protein, 14 aa, Homo sapiens
FDLHFCRSSIMKPK

SEQ ID NO: 632 - protein, 14 aa, Homo sapiens
DLHFCRSSIMKPKR

SEQ ID NO: 633 - protein, 14 aa, Homo sapiens
LHFCRSSIMKPKRD

SEQ ID NO: 634 - protein, 14 aa, Homo sapiens
HFCRSSIMKPKRDG

SEQ ID NO: 635 - protein, 14 aa, Homo sapiens
FCRSSIMKPKRDGY

SEQ ID NO: 636 - protein, 14 aa, Homo sapiens
CRSSIMKPKRDGYM

SEQ ID NO: 637 - protein, 14 aa, Homo sapiens
RSSIMKPKRDGYMF

SEQ ID NO: 638 - protein, 14 aa, Homo sapiens
SSIMKPKRDGYMFL

SEQ ID NO: 639 - protein, 14 aa, Homo sapiens
SIMKPKRDGYMFLK

SEQ ID NO: 640 - protein, 14 aa, Homo sapiens
IMKPKRDGYMFLKA

SEQ ID NO: 641 - protein, 14 aa, Homo sapiens
MKPKRDGYMFLKAE

SEQ ID NO: 642 - protein, 14 aa, Homo sapiens
KPKRDGYMFLKAES

SEQ ID NO: 643 - protein, 14 aa, Homo sapiens
PKRDGYMFLKAESK

SEQ ID NO: 644 - protein, 14 aa, Homo sapiens
KRDGYMFLKAESKI

SEQ ID NO: 645 - protein, 14 aa, Homo sapiens
RDGYMFLKAESKIM

SEQ ID NO: 646 - protein, 14 aa, Homo sapiens
DGYMFLKAESKIMF

SEQ ID NO: 647 - protein, 14 aa, Homo sapiens
GYMFLKAESKIMFA

SEQ ID NO: 648 - protein, 14 aa, Homo sapiens
YMFLKAESKIMFAT

SEQ ID NO: 649 - protein, 14 aa, Homo sapiens
MFLKAESKIMFATL

SEQ ID NO: 650 - protein, 14 aa, Homo sapiens
FLKAESKIMFATLQ

SEQ ID NO: 651 - protein, 14 aa, Homo sapiens
LKAESKIMFATLQR

SEQ ID NO: 652 - protein, 14 aa, Homo sapiens
KAESKIMFATLQRS

SEQ ID NO: 653 - protein, 14 aa, Homo sapiens
AESKIMFATLQRSS

SEQ ID NO: 654 - protein, 14 aa, Homo sapiens
ESKIMFATLQRSSL

SEQ ID NO: 655 - protein, 14 aa, Homo sapiens
SKIMFATLQRSSLW

SEQ ID NO: 656 - protein, 14 aa, Homo sapiens
KIMFATLQRSSLWC

SEQ ID NO: 657 - protein, 14 aa, Homo sapiens
IMFATLQRSSLWCL

SEQ ID NO: 658 - protein, 14 aa, Homo sapiens
MFATLQRSSLWCLC

SEQ ID NO: 659 - protein, 14 aa, Homo sapiens
FATLQRSSLWCLCS

SEQ ID NO: 660 - protein, 14 aa, Homo sapiens
ATLQRSSLWCLCSN

SEQ ID NO: 661 - protein, 14 aa, Homo sapiens
TLQRSSLWCLCSNH

SEQ ID NO: 662 - protein, 15 aa, Homo sapiens
EPCSMLTGPPARVPA

SEQ ID NO: 663 - protein, 15 aa, Homo sapiens
PCSMLTGPPARVPAV

SEQ ID NO: 664 - protein, 15 aa, Homo sapiens
CSMLTGPPARVPAVP

SEQ ID NO: 665 - protein, 15 aa, Homo sapiens
SMLTGPPARVPAVPF

SEQ ID NO: 666 - protein, 15 aa, Homo sapiens
MLTGPPARVPAVPFD

SEQ ID NO: 667 - protein, 15 aa, Homo sapiens
LTGPPARVPAVPFDL

SEQ ID NO: 668 - protein, 15 aa, Homo sapiens
TGPPARVPAVPFDLH

SEQ ID NO: 669 - protein, 15 aa, Homo sapiens
GPPARVPAVPFDLHF

SEQ ID NO: 670 - protein, 15 aa, Homo sapiens
PPARVPAVPFDLHFC

SEQ ID NO: 671 - protein, 15 aa, Homo sapiens
PARVPAVPFDLHFCR

SEQ ID NO: 672 - protein, 15 aa, Homo sapiens
ARVPAVPFDLHFCRS

SEQ ID NO: 673 - protein, 15 aa, Homo sapiens
RVPAVPFDLHFCRSS

SEQ ID NO: 674 - protein, 15 aa, Homo sapiens
VPAVPFDLHFCRSSI

SEQ ID NO: 675 - protein, 15 aa, Homo sapiens
PAVPFDLHFCRSSIM

SEQ ID NO: 676 - protein, 15 aa, Homo sapiens
AVPFDLHFCRSSIMK

SEQ ID NO: 677 - protein, 15 aa, Homo sapiens
VPFDLHFCRSSIMKP

SEQ ID NO: 678 - protein, 15 aa, Homo sapiens
PFDLHFCRSSIMKPK

SEQ ID NO: 679 - protein, 15 aa, Homo sapiens
FDLHFCRSSIMKPKR

SEQ ID NO: 680 - protein, 15 aa, Homo sapiens
DLHFCRSSIMKPKRD

SEQ ID NO: 681 - protein, 15 aa, Homo sapiens
LHFCRSSIMKPKRDG

SEQ ID NO: 682 - protein, 15 aa, Homo sapiens
HFCRSSIMKPKRDGY

SEQ ID NO: 683 - protein, 15 aa, Homo sapiens
FCRSSIMKPKRDGYM

SEQ ID NO: 684 - protein, 15 aa, Homo sapiens
CRSSIMKPKRDGYMF

SEQ ID NO: 685 - protein, 15 aa, Homo sapiens
RSSIMKPKRDGYMFL

SEQ ID NO: 686 - protein, 15 aa, Homo sapiens
SSIMKPKRDGYMFLK

SEQ ID NO: 687 - protein, 15 aa, Homo sapiens
SIMKPKRDGYMFLKA

SEQ ID NO: 688 - protein, 15 aa, Homo sapiens
IMKPKRDGYMFLKAE

SEQ ID NO: 689 - protein, 15 aa, Homo sapiens
MKPKRDGYMFLKAES

SEQ ID NO: 690 - protein, 15 aa, Homo sapiens
KPKRDGYMFLKAESK

SEQ ID NO: 691 - protein, 15 aa, Homo sapiens
PKRDGYMFLKAESKI

SEQ ID NO: 692 - protein, 15 aa, Homo sapiens
KRDGYMFLKAESKIM

SEQ ID NO: 693 - protein, 15 aa, Homo sapiens
RDGYMFLKAESKIMF

SEQ ID NO: 694 - protein, 15 aa, Homo sapiens
DGYMFLKAESKIMFA

SEQ ID NO: 695 - protein, 15 aa, Homo sapiens
GYMFLKAESKIMFAT

SEQ ID NO: 696 - protein, 15 aa, Homo sapiens
YMFLKAESKIMFATL

SEQ ID NO: 697 - protein, 15 aa, Homo sapiens
MFLKAESKIMFATLQ

SEQ ID NO: 698 - protein, 15 aa, Homo sapiens
FLKAESKIMFATLQR

SEQ ID NO: 699 - protein, 15 aa, Homo sapiens
LKAESKIMFATLQRS

SEQ ID NO: 700 - protein, 15 aa, Homo sapiens
KAESKIMFATLQRSS

SEQ ID NO: 701 - protein, 15 aa, Homo sapiens
AESKIMFATLQRSSL

SEQ ID NO: 702 - protein, 15 aa, Homo sapiens
ESKIMFATLQRSSLW

SEQ ID NO: 703 - protein, 15 aa, Homo sapiens
SKIMFATLQRSSLWC

SEQ ID NO: 704 - protein, 15 aa, Homo sapiens
KIMFATLQRSSLWCL

SEQ ID NO: 705 - protein, 15 aa, Homo sapiens
IMFATLQRSSLWCLC

SEQ ID NO: 706 - protein, 15 aa, Homo sapiens
MFATLQRSSLWCLCS

SEQ ID NO: 707 - protein, 15 aa, Homo sapiens
FATLQRSSLWCLCSN

SEQ ID NO: 708 - protein, 15 aa, Homo sapiens
ATLQRSSLWCLCSNH

SEQ ID NO: 709 - protein, 16 aa, Homo sapiens
EPCSMLTGPPARVPAV

SEQ ID NO: 710 - protein, 16 aa, Homo sapiens
PCSMLTGPPARVPAVP

SEQ ID NO: 711 - protein, 16 aa, Homo sapiens
CSMLTGPPARVPAVPF

SEQ ID NO: 712 - protein, 16 aa, Homo sapiens
SMLTGPPARVPAVPFD

SEQ ID NO: 713 - protein, 16 aa, Homo sapiens
MLTGPPARVPAVPFDL

SEQ ID NO: 714 - protein, 16 aa, Homo sapiens
LTGPPARVPAVPFDLH

SEQ ID NO: 715 - protein, 16 aa, Homo sapiens
TGPPARVPAVPFDLHF

SEQ ID NO: 716 - protein, 16 aa, Homo sapiens
GPPARVPAVPFDLHFC

SEQ ID NO: 717 - protein, 16 aa, Homo sapiens
PPARVPAVPFDLHFCR

SEQ ID NO: 718 - protein, 16 aa, Homo sapiens
PARVPAVPFDLHFCRS

SEQ ID NO: 719 - protein, 16 aa, Homo sapiens
ARVPAVPFDLHFCRSS

SEQ ID NO: 720 - protein, 16 aa, Homo sapiens
RVPAVPFDLHFCRSSI

SEQ ID NO: 721 - protein, 16 aa, Homo sapiens
VPAVPFDLHFCRSSIM

SEQ ID NO: 722 - protein, 16 aa, Homo sapiens
PAVPFDLHFCRSSIMK

SEQ ID NO: 723 - protein, 16 aa, Homo sapiens
AVPFDLHFCRSSIMKP

SEQ ID NO: 724 - protein, 16 aa, Homo sapiens
VPFDLHFCRSSIMKPK

SEQ ID NO: 725 - protein, 16 aa, Homo sapiens
PFDLHFCRSSIMKPKR

SEQ ID NO: 726 - protein, 16 aa, Homo sapiens
FDLHFCRSSIMKPKRD

SEQ ID NO: 727 - protein, 16 aa, Homo sapiens
DLHFCRSSIMKPKRDG

SEQ ID NO: 728 - protein, 16 aa, Homo sapiens
LHFCRSSIMKPKRDGY

SEQ ID NO: 729 - protein, 16 aa, Homo sapiens
HFCRSSIMKPKRDGYM

SEQ ID NO: 730 - protein, 16 aa, Homo sapiens
FCRSSIMKPKRDGYMF

SEQ ID NO: 731 - protein, 16 aa, Homo sapiens
CRSSIMKPKRDGYMFL

SEQ ID NO: 732 - protein, 16 aa, Homo sapiens
RSSIMKPKRDGYMFLK

SEQ ID NO: 733 - protein, 16 aa, Homo sapiens
SSIMKPKRDGYMFLKA

SEQ ID NO: 734 - protein, 16 aa, Homo sapiens
SIMKPKRDGYMFLKAE

SEQ ID NO: 735 - protein, 16 aa, Homo sapiens
IMKPKRDGYMFLKAES

SEQ ID NO: 736 - protein, 16 aa, Homo sapiens
MKPKRDGYMFLKAESK

SEQ ID NO: 737 - protein, 16 aa, Homo sapiens
KPKRDGYMFLKAESKI

SEQ ID NO: 738 - protein, 16 aa, Homo sapiens
PKRDGYMFLKAESKIM

SEQ ID NO: 739 - protein, 16 aa, Homo sapiens
KRDGYMFLKAESKIMF

SEQ ID NO: 740 - protein, 16 aa, Homo sapiens
RDGYMFLKAESKIMFA

SEQ ID NO: 741 - protein, 16 aa, Homo sapiens
DGYMFLKAESKIMFAT

SEQ ID NO: 742 - protein, 16 aa, Homo sapiens
GYMFLKAESKIMFATL

SEQ ID NO: 743 - protein, 16 aa, Homo sapiens
YMFLKAESKIMFATLQ

SEQ ID NO: 744 - protein, 16 aa, Homo sapiens
MFLKAESKIMFATLQR

SEQ ID NO: 745 - protein, 16 aa, Homo sapiens
FLKAESKIMFATLQRS

SEQ ID NO: 746 - protein, 16 aa, Homo sapiens
LKAESKIMFATLQRSS

SEQ ID NO: 747 - protein, 16 aa, Homo sapiens
KAESKIMFATLQRSSL

SEQ ID NO: 748 - protein, 16 aa, Homo sapiens
AESKIMFATLQRSSLW

SEQ ID NO: 749 - protein, 16 aa, Homo sapiens
ESKIMFATLQRSSLWC

SEQ ID NO: 750 - protein, 16 aa, Homo sapiens
SKIMFATLQRSSLWCL

SEQ ID NO: 751 - protein, 16 aa, Homo sapiens
KIMFATLQRSSLWCLC

SEQ ID NO: 752 - protein, 16 aa, Homo sapiens
IMFATLQRSSLWCLCS

SEQ ID NO: 753 - protein, 16 aa, Homo sapiens
MFATLQRSSLWCLCSN

SEQ ID NO: 754 - protein, 16 aa, Homo sapiens
FATLQRSSLWCLCSNH

SEQ ID NO: 755 - protein, 17 aa, Homo sapiens
EPCSMLTGPPARVPAVP

SEQ ID NO: 756 - protein, 17 aa, Homo sapiens
PCSMLTGPPARVPAVPF

SEQ ID NO: 757 - protein, 17 aa, Homo sapiens
CSMLTGPPARVPAVPFD

SEQ ID NO: 758 - protein, 17 aa, Homo sapiens
SMLTGPPARVPAVPFDL

SEQ ID NO: 759 - protein, 17 aa, Homo sapiens
MLTGPPARVPAVPFDLH

SEQ ID NO: 760 - protein, 17 aa, Homo sapiens
LTGPPARVPAVPFDLHF

SEQ ID NO: 761 - protein, 17 aa, Homo sapiens
TGPPARVPAVPFDLHFC

SEQ ID NO: 762 - protein, 17 aa, Homo sapiens
GPPARVPAVPFDLHFCR

SEQ ID NO: 763 - protein, 17 aa, Homo sapiens
PPARVPAVPFDLHFCRS

SEQ ID NO: 764 - protein, 17 aa, Homo sapiens
PARVPAVPFDLHFCRSS

SEQ ID NO: 765 - protein, 17 aa, Homo sapiens
ARVPAVPFDLHFCRSSI

SEQ ID NO: 766 - protein, 17 aa, Homo sapiens
RVPAVPFDLHFCRSSIM

SEQ ID NO: 767 - protein, 17 aa, Homo sapiens
VPAVPFDLHFCRSSIMK

SEQ ID NO: 768 - protein, 17 aa, Homo sapiens
PAVPFDLHFCRSSIMKP

SEQ ID NO: 769 - protein, 17 aa, Homo sapiens
AVPFDLHFCRSSIMKPK

SEQ ID NO: 770 - protein, 17 aa, Homo sapiens
VPFDLHFCRSSIMKPKR

SEQ ID NO: 771 - protein, 17 aa, Homo sapiens
PFDLHFCRSSIMKPKRD

SEQ ID NO: 772 - protein, 17 aa, Homo sapiens
FDLHFCRSSIMKPKRDG

SEQ ID NO: 773 - protein, 17 aa, Homo sapiens
DLHFCRSSIMKPKRDGY

SEQ ID NO: 774 - protein, 17 aa, Homo sapiens
LHFCRSSIMKPKRDGYM

SEQ ID NO: 775 - protein, 17 aa, Homo sapiens
HFCRSSIMKPKRDGYMF

SEQ ID NO: 776 - protein, 17 aa, Homo sapiens
FCRSSIMKPKRDGYMFL

SEQ ID NO: 777 - protein, 17 aa, Homo sapiens
CRSSIMKPKRDGYMFLK

SEQ ID NO: 778 - protein, 17 aa, Homo sapiens
RSSIMKPKRDGYMFLKA

SEQ ID NO: 779 - protein, 17 aa, Homo sapiens
SSIMKPKRDGYMFLKAE

SEQ ID NO: 780 - protein, 17 aa, Homo sapiens
SIMKPKRDGYMFLKAES

SEQ ID NO: 781 - protein, 17 aa, Homo sapiens
IMKPKRDGYMFLKAESK

SEQ ID NO: 782 - protein, 17 aa, Homo sapiens
MKPKRDGYMFLKAESKI

SEQ ID NO: 783 - protein, 17 aa, Homo sapiens
KPKRDGYMFLKAESKIM

SEQ ID NO: 784 - protein, 17 aa, Homo sapiens
PKRDGYMFLKAESKIMF

SEQ ID NO: 785 - protein, 17 aa, Homo sapiens
KRDGYMFLKAESKIMFA

SEQ ID NO: 786 - protein, 17 aa, Homo sapiens
RDGYMFLKAESKIMFAT

SEQ ID NO: 787 - protein, 17 aa, Homo sapiens
DGYMFLKAESKIMFATL

SEQ ID NO: 788 - protein, 17 aa, Homo sapiens
GYMFLKAESKIMFATLQ

SEQ ID NO: 789 - protein, 17 aa, Homo sapiens
YMFLKAESKIMFATLQR

SEQ ID NO: 790 - protein, 17 aa, Homo sapiens
MFLKAESKIMFATLQRS

SEQ ID NO: 791 - protein, 17 aa, Homo sapiens
FLKAESKIMFATLQRSS

SEQ ID NO: 792 - protein, 17 aa, Homo sapiens
LKAESKIMFATLQRSSL

SEQ ID NO: 793 - protein, 17 aa, Homo sapiens
KAESKIMFATLQRSSLW

SEQ ID NO: 794 - protein, 17 aa, Homo sapiens
AESKIMFATLQRSSLWC

SEQ ID NO: 795 - protein, 17 aa, Homo sapiens
ESKIMFATLQRSSLWCL

SEQ ID NO: 796 - protein, 17 aa, Homo sapiens
SKIMFATLQRSSLWCLC

SEQ ID NO: 797 - protein, 17 aa, Homo sapiens
KIMFATLQRSSLWCLCS

SEQ ID NO: 798 - protein, 17 aa, Homo sapiens
IMFATLQRSSLWCLCSN

SEQ ID NO: 799 - protein, 17 aa, Homo sapiens
MFATLQRSSLWCLCSNH

SEQ ID NO: 800 - protein, 18 aa, Homo sapiens
EPCSMLTGPPARVPAVPF

SEQ ID NO: 801 - protein, 18 aa, Homo sapiens
PCSMLTGPPARVPAVPFD

SEQ ID NO: 802 - protein, 18 aa, Homo sapiens
CSMLTGPPARVPAVPFDL

SEQ ID NO: 803 - protein, 18 aa, Homo sapiens
SMLTGPPARVPAVPFDLH

SEQ ID NO: 804 - protein, 18 aa, Homo sapiens
MLTGPPARVPAVPFDLHF

SEQ ID NO: 805 - protein, 18 aa, Homo sapiens
LTGPPARVPAVPFDLHFC

SEQ ID NO: 806 - protein, 18 aa, Homo sapiens
TGPPARVPAVPFDLHFCR

SEQ ID NO: 807 - protein, 18 aa, Homo sapiens
GPPARVPAVPFDLHFCRS

SEQ ID NO: 808 - protein, 18 aa, Homo sapiens
PPARVPAVPFDLHFCRSS

SEQ ID NO: 809 - protein, 18 aa, Homo sapiens
PARVPAVPFDLHFCRSSI

SEQ ID NO: 810 - protein, 18 aa, Homo sapiens
ARVPAVPFDLHFCRSSIM

SEQ ID NO: 811 - protein, 18 aa, Homo sapiens
RVPAVPFDLHFCRSSIMK

SEQ ID NO: 812 - protein, 18 aa, Homo sapiens
VPAVPFDLHFCRSSIMKP

SEQ ID NO: 813 - protein, 18 aa, Homo sapiens
PAVPFDLHFCRSSIMKPK

SEQ ID NO: 814 - protein, 18 aa, Homo sapiens
AVPFDLHFCRSSIMKPKR

SEQ ID NO: 815 - protein, 18 aa, Homo sapiens
VPFDLHFCRSSIMKPKRD

SEQ ID NO: 816 - protein, 18 aa, Homo sapiens
PFDLHFCRSSIMKPKRDG

SEQ ID NO: 817 - protein, 18 aa, Homo sapiens
FDLHFCRSSIMKPKRDGY

SEQ ID NO: 818 - protein, 18 aa, Homo sapiens
DLHFCRSSIMKPKRDGYM

SEQ ID NO: 819 - protein, 18 aa, Homo sapiens
LHFCRSSIMKPKRDGYMF

SEQ ID NO: 820 - protein, 18 aa, Homo sapiens
HFCRSSIMKPKRDGYMFL

SEQ ID NO: 821 - protein, 18 aa, Homo sapiens
FCRSSIMKPKRDGYMFLK

SEQ ID NO: 822 - protein, 18 aa, Homo sapiens
CRSSIMKPKRDGYMFLKA

SEQ ID NO: 823 - protein, 18 aa, Homo sapiens
RSSIMKPKRDGYMFLKAE

SEQ ID NO: 824 - protein, 18 aa, Homo sapiens
SSIMKPKRDGYMFLKAES

SEQ ID NO: 825 - protein, 18 aa, Homo sapiens
SIMKPKRDGYMFLKAESK

SEQ ID NO: 826 - protein, 18 aa, Homo sapiens
IMKPKRDGYMFLKAESKI

SEQ ID NO: 827 - protein, 18 aa, Homo sapiens
MKPKRDGYMFLKAESKIM

SEQ ID NO: 828 - protein, 18 aa, Homo sapiens
KPKRDGYMFLKAESKIMF

SEQ ID NO: 829 - protein, 18 aa, Homo sapiens
PKRDGYMFLKAESKIMFA

SEQ ID NO: 830 - protein, 18 aa, Homo sapiens
KRDGYMFLKAESKIMFAT

SEQ ID NO: 831 - protein, 18 aa, Homo sapiens
RDGYMFLKAESKIMFATL

SEQ ID NO: 832 - protein, 18 aa, Homo sapiens
DGYMFLKAESKIMFATLQ

SEQ ID NO: 833 - protein, 18 aa, Homo sapiens
GYMFLKAESKIMFATLQR

SEQ ID NO: 834 - protein, 18 aa, Homo sapiens
YMFLKAESKIMFATLQRS

SEQ ID NO: 835 - protein, 18 aa, Homo sapiens
MFLKAESKIMFATLQRSS

SEQ ID NO: 836 - protein, 18 aa, Homo sapiens
FLKAESKIMFATLQRSSL

SEQ ID NO: 837 - protein, 18 aa, Homo sapiens
LKAESKIMFATLQRSSLW

SEQ ID NO: 838 - protein, 18 aa, Homo sapiens
KAESKIMFATLQRSSLWC

SEQ ID NO: 839 - protein, 18 aa, Homo sapiens
AESKIMFATLQRSSLWCL

SEQ ID NO: 840 - protein, 18 aa, Homo sapiens
ESKIMFATLQRSSLWCLC

SEQ ID NO: 841 - protein, 18 aa, Homo sapiens
SKIMFATLQRSSLWCLCS

SEQ ID NO: 842 - protein, 18 aa, Homo sapiens
KIMFATLQRSSLWCLCSN

SEQ ID NO: 843 - protein, 18 aa, Homo sapiens
IMFATLQRSSLWCLCSNH

SEQ ID NO: 844 - protein, 19 aa, Homo sapiens
EPCSMLTGPPARVPAVPFD

SEQ ID NO: 845 - protein, 19 aa, Homo sapiens
PCSMLTGPPARVPAVPFDL

SEQ ID NO: 846 - protein, 19 aa, Homo sapiens
CSMLTGPPARVPAVPFDLH

SEQ ID NO: 847 - protein, 19 aa, Homo sapiens
SMLTGPPARVPAVPFDLHF

SEQ ID NO: 848 - protein, 19 aa, Homo sapiens
MLTGPPARVPAVPFDLHFC

SEQ ID NO: 849 - protein, 19 aa, Homo sapiens
LTGPPARVPAVPFDLHFCR

SEQ ID NO: 850 - protein, 19 aa, Homo sapiens
TGPPARVPAVPFDLHFCRS

SEQ ID NO: 851 - protein, 19 aa, Homo sapiens
GPPARVPAVPFDLHFCRSS

SEQ ID NO: 852 - protein, 19 aa, Homo sapiens
PPARVPAVPFDLHFCRSSI

SEQ ID NO: 853 - protein, 19 aa, Homo sapiens
PARVPAVPFDLHFCRSSIM

SEQ ID NO: 854 - protein, 19 aa, Homo sapiens
ARVPAVPFDLHFCRSSIMK

SEQ ID NO: 855 - protein, 19 aa, Homo sapiens
RVPAVPFDLHFCRSSIMKP

SEQ ID NO: 856 - protein, 19 aa, Homo sapiens
VPAVPFDLHFCRSSIMKPK

SEQ ID NO: 857 - protein, 19 aa, Homo sapiens
PAVPFDLHFCRSSIMKPKR

SEQ ID NO: 858 - protein, 19 aa, Homo sapiens
AVPFDLHFCRSSIMKPKRD

SEQ ID NO: 859 - protein, 19 aa, Homo sapiens
VPFDLHFCRSSIMKPKRDG

SEQ ID NO: 860 - protein, 19 aa, Homo sapiens
PFDLHFCRSSIMKPKRDGY

SEQ ID NO: 861 - protein, 19 aa, Homo sapiens
FDLHFCRSSIMKPKRDGYM

SEQ ID NO: 862 - protein, 19 aa, Homo sapiens
DLHFCRSSIMKPKRDGYMF

SEQ ID NO: 863 - protein, 19 aa, Homo sapiens
LHFCRSSIMKPKRDGYMFL

SEQ ID NO: 864 - protein, 19 aa, Homo sapiens
HFCRSSIMKPKRDGYMFLK

SEQ ID NO: 865 - protein, 19 aa, Homo sapiens
FCRSSIMKPKRDGYMFLKA

SEQ ID NO: 866 - protein, 19 aa, Homo sapiens
CRSSIMKPKRDGYMFLKAE

SEQ ID NO: 867 - protein, 19 aa, Homo sapiens
RSSIMKPKRDGYMFLKAES

SEQ ID NO: 868 - protein, 19 aa, Homo sapiens
SSIMKPKRDGYMFLKAESK

SEQ ID NO: 869 - protein, 19 aa, Homo sapiens
SIMKPKRDGYMFLKAESKI

SEQ ID NO: 870 - protein, 19 aa, Homo sapiens
IMKPKRDGYMFLKAESKIM

SEQ ID NO: 871 - protein, 19 aa, Homo sapiens
MKPKRDGYMFLKAESKIMF

SEQ ID NO: 872 - protein, 19 aa, Homo sapiens
KPKRDGYMFLKAESKIMFA

SEQ ID NO: 873 - protein, 19 aa, Homo sapiens
PKRDGYMFLKAESKIMFAT

SEQ ID NO: 874 - protein, 19 aa, Homo sapiens
KRDGYMFLKAESKIMFATL

SEQ ID NO: 875 - protein, 19 aa, Homo sapiens
RDGYMFLKAESKIMFATLQ

SEQ ID NO: 876 - protein, 19 aa, Homo sapiens
DGYMFLKAESKIMFATLQR

SEQ ID NO: 877 - protein, 19 aa, Homo sapiens
GYMFLKAESKIMFATLQRS

SEQ ID NO: 878 - protein, 19 aa, Homo sapiens
YMFLKAESKIMFATLQRSS

SEQ ID NO: 879 - protein, 19 aa, Homo sapiens
MFLKAESKIMFATLQRSSL

SEQ ID NO: 880 - protein, 19 aa, Homo sapiens
FLKAESKIMFATLQRSSLW

SEQ ID NO: 881 - protein, 19 aa, Homo sapiens
LKAESKIMFATLQRSSLWC

SEQ ID NO: 882 - protein, 19 aa, Homo sapiens
KAESKIMFATLQRSSLWCL

SEQ ID NO: 883 - protein, 19 aa, Homo sapiens
AESKIMFATLQRSSLWCLC

SEQ ID NO: 884 - protein, 19 aa, Homo sapiens
ESKIMFATLQRSSLWCLCS

SEQ ID NO: 885 - protein, 19 aa, Homo sapiens
SKIMFATLQRSSLWCLCSN

SEQ ID NO: 886 - protein, 19 aa, Homo sapiens
KIMFATLQRSSLWCLCSNH

SEQ ID NO: 887 - protein, 20 aa, Homo sapiens
EPCSMLTGPPARVPAVPFDL

SEQ ID NO: 888 - protein, 20 aa, Homo sapiens
PCSMLTGPPARVPAVPFDLH

SEQ ID NO: 889 - protein, 20 aa, Homo sapiens
CSMLTGPPARVPAVPFDLHF

SEQ ID NO: 890 - protein, 20 aa, Homo sapiens
SMLTGPPARVPAVPFDLHFC

SEQ ID NO: 891 - protein, 20 aa, Homo sapiens
MLTGPPARVPAVPFDLHFCR

SEQ ID NO: 892 - protein, 20 aa, Homo sapiens
LTGPPARVPAVPFDLHFCRS

SEQ ID NO: 893 - protein, 20 aa, Homo sapiens
TGPPARVPAVPFDLHFCRSS

SEQ ID NO: 894 - protein, 20 aa, Homo sapiens
GPPARVPAVPFDLHFCRSSI

SEQ ID NO: 895 - protein, 20 aa, Homo sapiens
PPARVPAVPFDLHFCRSSIM

SEQ ID NO: 896 - protein, 20 aa, Homo sapiens
PARVPAVPFDLHFCRSSIMK

SEQ ID NO: 897 - protein, 20 aa, Homo sapiens
ARVPAVPFDLHFCRSSIMKP

SEQ ID NO: 898 - protein, 20 aa, Homo sapiens
RVPAVPFDLHFCRSSIMKPK

SEQ ID NO: 899 - protein, 20 aa, Homo sapiens
VPAVPFDLHFCRSSIMKPKR

SEQ ID NO: 900 - protein, 20 aa, Homo sapiens
PAVPFDLHFCRSSIMKPKRD

SEQ ID NO: 901 - protein, 20 aa, Homo sapiens
AVPFDLHFCRSSIMKPKRDG

SEQ ID NO: 902 - protein, 20 aa, Homo sapiens
VPFDLHFCRSSIMKPKRDGY

SEQ ID NO: 903 - protein, 20 aa, Homo sapiens
PFDLHFCRSSIMKPKRDGYM

SEQ ID NO: 904 - protein, 20 aa, Homo sapiens
FDLHFCRSSIMKPKRDGYMF

SEQ ID NO: 905 - protein, 20 aa, Homo sapiens
DLHFCRSSIMKPKRDGYMFL

SEQ ID NO: 906 - protein, 20 aa, Homo sapiens
LHFCRSSIMKPKRDGYMFLK

SEQ ID NO: 907 - protein, 20 aa, Homo sapiens
HFCRSSIMKPKRDGYMFLKA

SEQ ID NO: 908 - protein, 20 aa, Homo sapiens
FCRSSIMKPKRDGYMFLKAE

SEQ ID NO: 909 - protein, 20 aa, Homo sapiens
CRSSIMKPKRDGYMFLKAES

SEQ ID NO: 910 - protein, 20 aa, Homo sapiens
RSSIMKPKRDGYMFLKAESK

SEQ ID NO: 911 - protein, 20 aa, Homo sapiens
SSIMKPKRDGYMFLKAESKI

SEQ ID NO: 912 - protein, 20 aa, Homo sapiens
SIMKPKRDGYMFLKAESKIM

SEQ ID NO: 913 - protein, 20 aa, Homo sapiens
IMKPKRDGYMFLKAESKIMF

SEQ ID NO: 914 - protein, 20 aa, Homo sapiens
MKPKRDGYMFLKAESKIMFA

SEQ ID NO: 915 - protein, 20 aa, Homo sapiens
KPKRDGYMFLKAESKIMFAT

SEQ ID NO: 916 - protein, 20 aa, Homo sapiens
PKRDGYMFLKAESKIMFATL

SEQ ID NO: 917 - protein, 20 aa, Homo sapiens
KRDGYMFLKAESKIMFATLQ

SEQ ID NO: 918 - protein, 20 aa, Homo sapiens
RDGYMFLKAESKIMFATLQR

SEQ ID NO: 919 - protein, 20 aa, Homo sapiens
DGYMFLKAESKIMFATLQRS

SEQ ID NO: 920 - protein, 20 aa, Homo sapiens
GYMFLKAESKIMFATLQRSS

SEQ ID NO: 921 - protein, 20 aa, Homo sapiens
YMFLKAESKIMFATLQRSSL

SEQ ID NO: 922 - protein, 20 aa, Homo sapiens
MFLKAESKIMFATLQRSSLW

SEQ ID NO: 923 - protein, 20 aa, Homo sapiens
FLKAESKIMFATLQRSSLWC

SEQ ID NO: 924 - protein, 20 aa, Homo sapiens
LKAESKIMFATLQRSSLWCL

SEQ ID NO: 925 - protein, 20 aa, Homo sapiens
KAESKIMFATLQRSSLWCLC

SEQ ID NO: 926 - protein, 20 aa, Homo sapiens
AESKIMFATLQRSSLWCLCS

SEQ ID NO: 927 - protein, 20 aa, Homo sapiens
ESKIMFATLQRSSLWCLCSN

SEQ ID NO: 928 - protein, 20 aa, Homo sapiens
SKIMFATLQRSSLWCLCSNH

SEQ ID NO: 929 - protein, 21 aa, Homo sapiens
EPCSMLTGPPARVPAVPFDLH

SEQ ID NO: 930 - protein, 21 aa, Homo sapiens
PCSMLTGPPARVPAVPFDLHF

SEQ ID NO: 931 - protein, 21 aa, Homo sapiens
CSMLTGPPARVPAVPFDLHFC

SEQ ID NO: 932 - protein, 21 aa, Homo sapiens
SMLTGPPARVPAVPFDLHFCR

SEQ ID NO: 933 - protein, 21 aa, Homo sapiens
MLTGPPARVPAVPFDLHFCRS

SEQ ID NO: 934 - protein, 21 aa, Homo sapiens
LTGPPARVPAVPFDLHFCRSS

SEQ ID NO: 935 - protein, 21 aa, Homo sapiens
TGPPARVPAVPFDLHFCRSSI

SEQ ID NO: 936 - protein, 21 aa, Homo sapiens
GPPARVPAVPFDLHFCRSSIM

SEQ ID NO: 937 - protein, 21 aa, Homo sapiens
PPARVPAVPFDLHFCRSSIMK

SEQ ID NO: 938 - protein, 21 aa, Homo sapiens
PARVPAVPFDLHFCRSSIMKP

SEQ ID NO: 939 - protein, 21 aa, Homo sapiens
ARVPAVPFDLHFCRSSIMKPK

SEQ ID NO: 940 - protein, 21 aa, Homo sapiens
RVPAVPFDLHFCRSSIMKPKR

SEQ ID NO: 941 - protein, 21 aa, Homo sapiens
VPAVPFDLHFCRSSIMKPKRD

SEQ ID NO: 942 - protein, 21 aa, Homo sapiens
PAVPFDLHFCRSSIMKPKRDG

SEQ ID NO: 943 - protein, 21 aa, Homo sapiens
AVPFDLHFCRSSIMKPKRDGY

SEQ ID NO: 944 - protein, 21 aa, Homo sapiens
VPFDLHFCRSSIMKPKRDGYM

SEQ ID NO: 945 - protein, 21 aa, Homo sapiens
PFDLHFCRSSIMKPKRDGYMF

SEQ ID NO: 946 - protein, 21 aa, Homo sapiens
FDLHFCRSSIMKPKRDGYMFL

SEQ ID NO: 947 - protein, 21 aa, Homo sapiens
DLHFCRSSIMKPKRDGYMFLK

SEQ ID NO: 948 - protein, 21 aa, Homo sapiens
LHFCRSSIMKPKRDGYMFLKA

SEQ ID NO: 949 - protein, 21 aa, Homo sapiens
HFCRSSIMKPKRDGYMFLKAE

SEQ ID NO: 950 - protein, 21 aa, Homo sapiens
FCRSSIMKPKRDGYMFLKAES

SEQ ID NO: 951 - protein, 21 aa, Homo sapiens
CRSSIMKPKRDGYMFLKAESK

SEQ ID NO: 952 - protein, 21 aa, Homo sapiens
RSSIMKPKRDGYMFLKAESKI

SEQ ID NO: 953 - protein, 21 aa, Homo sapiens
SSIMKPKRDGYMFLKAESKIM

SEQ ID NO: 954 - protein, 21 aa, Homo sapiens
SIMKPKRDGYMFLKAESKIMF

SEQ ID NO: 955 - protein, 21 aa, Homo sapiens
IMKPKRDGYMFLKAESKIMFA

SEQ ID NO: 956 - protein, 21 aa, Homo sapiens
MKPKRDGYMFLKAESKIMFAT

SEQ ID NO: 957 - protein, 21 aa, Homo sapiens
KPKRDGYMFLKAESKIMFATL

SEQ ID NO: 958 - protein, 21 aa, Homo sapiens
PKRDGYMFLKAESKIMFATLQ

SEQ ID NO: 959 - protein, 21 aa, Homo sapiens
KRDGYMFLKAESKIMFATLQR

SEQ ID NO: 960 - protein, 21 aa, Homo sapiens
RDGYMFLKAESKIMFATLQRS

SEQ ID NO: 961 - protein, 21 aa, Homo sapiens
DGYMFLKAESKIMFATLQRSS

SEQ ID NO: 962 - protein, 21 aa, Homo sapiens
GYMFLKAESKIMFATLQRSSL

SEQ ID NO: 963 - protein, 21 aa, Homo sapiens
YMFLKAESKIMFATLQRSSLW

SEQ ID NO: 964 - protein, 21 aa, Homo sapiens
MFLKAESKIMFATLQRSSLWC

SEQ ID NO: 965 - protein, 21 aa, Homo sapiens
FLKAESKIMFATLQRSSLWCL

SEQ ID NO: 966 - protein, 21 aa, Homo sapiens
LKAESKIMFATLQRSSLWCLC

SEQ ID NO: 967 - protein, 21 aa, Homo sapiens
KAESKIMFATLQRSSLWCLCS

SEQ ID NO: 968 - protein, 21 aa, Homo sapiens
AESKIMFATLQRSSLWCLCSN

SEQ ID NO: 969 - protein, 21 aa, Homo sapiens
ESKIMFATLQRSSLWCLCSNH

SEQ ID NO: 970 - protein, 22 aa, Homo sapiens
EPCSMLTGPPARVPAVPFDLHF

SEQ ID NO: 971 - protein, 22 aa, Homo sapiens
PCSMLTGPPARVPAVPFDLHFC

SEQ ID NO: 972 - protein, 22 aa, Homo sapiens
CSMLTGPPARVPAVPFDLHFCR

SEQ ID NO: 973 - protein, 22 aa, Homo sapiens
SMLTGPPARVPAVPFDLHFCRS

SEQ ID NO: 974 - protein, 22 aa, Homo sapiens
MLTGPPARVPAVPFDLHFCRSS

SEQ ID NO: 975 - protein, 22 aa, Homo sapiens
LTGPPARVPAVPFDLHFCRSSI

SEQ ID NO: 976 - protein, 22 aa, Homo sapiens
TGPPARVPAVPFDLHFCRSSIM

SEQ ID NO: 977 - protein, 22 aa, Homo sapiens
GPPARVPAVPFDLHFCRSSIMK

SEQ ID NO: 978 - protein, 22 aa, Homo sapiens
PPARVPAVPFDLHFCRSSIMKP

SEQ ID NO: 979 - protein, 22 aa, Homo sapiens
PARVPAVPFDLHFCRSSIMKPK

SEQ ID NO: 980 - protein, 22 aa, Homo sapiens
ARVPAVPFDLHFCRSSIMKPKR

SEQ ID NO: 981 - protein, 22 aa, Homo sapiens
RVPAVPFDLHFCRSSIMKPKRD

SEQ ID NO: 982 - protein, 22 aa, Homo sapiens
VPAVPFDLHFCRSSIMKPKRDG

SEQ ID NO: 983 - protein, 22 aa, Homo sapiens
PAVPFDLHFCRSSIMKPKRDGY

SEQ ID NO: 984 - protein, 22 aa, Homo sapiens
AVPFDLHFCRSSIMKPKRDGYM

SEQ ID NO: 985 - protein, 22 aa, Homo sapiens
VPFDLHFCRSSIMKPKRDGYMF

SEQ ID NO: 986 - protein, 22 aa, Homo sapiens
PFDLHFCRSSIMKPKRDGYMFL

SEQ ID NO: 987 - protein, 22 aa, Homo sapiens
FDLHFCRSSIMKPKRDGYMFLK

SEQ ID NO: 988 - protein, 22 aa, Homo sapiens
DLHFCRSSIMKPKRDGYMFLKA

SEQ ID NO: 989 - protein, 22 aa, Homo sapiens
LHFCRSSIMKPKRDGYMFLKAE

SEQ ID NO: 990 - protein, 22 aa, Homo sapiens
HFCRSSIMKPKRDGYMFLKAES

SEQ ID NO: 991 - protein, 22 aa, Homo sapiens
FCRSSIMKPKRDGYMFLKAESK

SEQ ID NO: 992 - protein, 22 aa, Homo sapiens
CRSSIMKPKRDGYMFLKAESKI

SEQ ID NO: 993 - protein, 22 aa, Homo sapiens
RSSIMKPKRDGYMFLKAESKIM

SEQ ID NO: 994 - protein, 22 aa, Homo sapiens
SSIMKPKRDGYMFLKAESKIMF

SEQ ID NO: 995 - protein, 22 aa, Homo sapiens
SIMKPKRDGYMFLKAESKIMFA

SEQ ID NO: 996 - protein, 22 aa, Homo sapiens
IMKPKRDGYMFLKAESKIMFAT

SEQ ID NO: 997 - protein, 22 aa, Homo sapiens
MKPKRDGYMFLKAESKIMFATL

SEQ ID NO: 998 - protein, 22 aa, Homo sapiens
KPKRDGYMFLKAESKIMFATLQ

SEQ ID NO: 999 - protein, 22 aa, Homo sapiens
PKRDGYMFLKAESKIMFATLQR

SEQ ID NO: 1000 - protein, 22 aa, Homo sapiens
KRDGYMFLKAESKIMFATLQRS

SEQ ID NO: 1001 - protein, 22 aa, Homo sapiens
RDGYMFLKAESKIMFATLQRSS

SEQ ID NO: 1002 - protein, 22 aa, Homo sapiens
DGYMFLKAESKIMFATLQRSSL

SEQ ID NO: 1003 - protein, 22 aa, Homo sapiens
GYMFLKAESKIMFATLQRSSLW

SEQ ID NO: 1004 - protein, 22 aa, Homo sapiens
YMFLKAESKIMFATLQRSSLWC

SEQ ID NO: 1005 - protein, 22 aa, Homo sapiens
MFLKAESKIMFATLQRSSLWCL

SEQ ID NO: 1006 - protein, 22 aa, Homo sapiens
FLKAESKIMFATLQRSSLWCLC

SEQ ID NO: 1007 - protein, 22 aa, Homo sapiens
LKAESKIMFATLQRSSLWCLCS

SEQ ID NO: 1008 - protein, 22 aa, Homo sapiens
KAESKIMFATLQRSSLWCLCSN

SEQ ID NO: 1009 - protein, 22 aa, Homo sapiens
AESKIMFATLQRSSLWCLCSNH

SEQ ID NO: 1010 - protein, 23 aa, Homo sapiens
EPCSMLTGPPARVPAVPFDLHFC

SEQ ID NO: 1011 - protein, 23 aa, Homo sapiens
PCSMLTGPPARVPAVPFDLHFCR

SEQ ID NO: 1012 - protein, 23 aa, Homo sapiens
CSMLTGPPARVPAVPFDLHFCRS

SEQ ID NO: 1013 - protein, 23 aa, Homo sapiens
SMLTGPPARVPAVPFDLHFCRSS

SEQ ID NO: 1014 - protein, 23 aa, Homo sapiens
MLTGPPARVPAVPFDLHFCRSSI

SEQ ID NO: 1015 - protein, 23 aa, Homo sapiens
LTGPPARVPAVPFDLHFCRSSIM

SEQ ID NO: 1016 - protein, 23 aa, Homo sapiens
TGPPARVPAVPFDLHFCRSSIMK

SEQ ID NO: 1017 - protein, 23 aa, Homo sapiens
GPPARVPAVPFDLHFCRSSIMKP

SEQ ID NO: 1018 - protein, 23 aa, Homo sapiens
PPARVPAVPFDLHFCRSSIMKPK

SEQ ID NO: 1019 - protein, 23 aa, Homo sapiens
PARVPAVPFDLHFCRSSIMKPKR

SEQ ID NO: 1020 - protein, 23 aa, Homo sapiens
ARVPAVPFDLHFCRSSIMKPKRD

SEQ ID NO: 1021 - protein, 23 aa, Homo sapiens
RVPAVPFDLHFCRSSIMKPKRDG

SEQ ID NO: 1022 - protein, 23 aa, Homo sapiens
VPAVPFDLHFCRSSIMKPKRDGY

SEQ ID NO: 1023 - protein, 23 aa, Homo sapiens
PAVPFDLHFCRSSIMKPKRDGYM

SEQ ID NO: 1024 - protein, 23 aa, Homo sapiens
AVPFDLHFCRSSIMKPKRDGYMF

SEQ ID NO: 1025 - protein, 23 aa, Homo sapiens
VPFDLHFCRSSIMKPKRDGYMFL

SEQ ID NO: 1026 - protein, 23 aa, Homo sapiens
PFDLHFCRSSIMKPKRDGYMFLK

SEQ ID NO: 1027 - protein, 23 aa, Homo sapiens
FDLHFCRSSIMKPKRDGYMFLKA

SEQ ID NO: 1028 - protein, 23 aa, Homo sapiens
DLHFCRSSIMKPKRDGYMFLKAE

SEQ ID NO: 1029 - protein, 23 aa, Homo sapiens
LHFCRSSIMKPKRDGYMFLKAES

SEQ ID NO: 1030 - protein, 23 aa, Homo sapiens
HFCRSSIMKPKRDGYMFLKAESK

SEQ ID NO: 1031 - protein, 23 aa, Homo sapiens
FCRSSIMKPKRDGYMFLKAESKI

SEQ ID NO: 1032 - protein, 23 aa, Homo sapiens
CRSSIMKPKRDGYMFLKAESKIM

SEQ ID NO: 1033 - protein, 23 aa, Homo sapiens
RSSIMKPKRDGYMFLKAESKIMF

SEQ ID NO: 1034 - protein, 23 aa, Homo sapiens
SSIMKPKRDGYMFLKAESKIMFA

SEQ ID NO: 1035 - protein, 23 aa, Homo sapiens
SIMKPKRDGYMFLKAESKIMFAT

SEQ ID NO: 1036 - protein, 23 aa, Homo sapiens
IMKPKRDGYMFLKAESKIMFATL

SEQ ID NO: 1037 - protein, 23 aa, Homo sapiens
MKPKRDGYMFLKAESKIMFATLQ

SEQ ID NO: 1038 - protein, 23 aa, Homo sapiens
KPKRDGYMFLKAESKIMFATLQR

SEQ ID NO: 1039 - protein, 23 aa, Homo sapiens
PKRDGYMFLKAESKIMFATLQRS

SEQ ID NO: 1040 - protein, 23 aa, Homo sapiens
KRDGYMFLKAESKIMFATLQRSS

SEQ ID NO: 1041 - protein, 23 aa, Homo sapiens
RDGYMFLKAESKIMFATLQRSSL

SEQ ID NO: 1042 - protein, 23 aa, Homo sapiens
DGYMFLKAESKIMFATLQRSSLW

SEQ ID NO: 1043 - protein, 23 aa, Homo sapiens
GYMFLKAESKIMFATLQRSSLWC

SEQ ID NO: 1044 - protein, 23 aa, Homo sapiens
YMFLKAESKIMFATLQRSSLWCL

SEQ ID NO: 1045 - protein, 23 aa, Homo sapiens
MFLKAESKIMFATLQRSSLWCLC

SEQ ID NO: 1046 - protein, 23 aa, Homo sapiens
FLKAESKIMFATLQRSSLWCLCS

SEQ ID NO: 1047 - protein, 23 aa, Homo sapiens
LKAESKIMFATLQRSSLWCLCSN

SEQ ID NO: 1048 - protein, 23 aa, Homo sapiens
KAESKIMFATLQRSSLWCLCSNH

SEQ ID NO: 1049 - protein, 24 aa, Homo sapiens
EPCSMLTGPPARVPAVPFDLHFCR

SEQ ID NO: 1050 - protein, 24 aa, Homo sapiens
PCSMLTGPPARVPAVPFDLHFCRS

SEQ ID NO: 1051 - protein, 24 aa, Homo sapiens
CSMLTGPPARVPAVPFDLHFCRSS

SEQ ID NO: 1052 - protein, 24 aa, Homo sapiens
SMLTGPPARVPAVPFDLHFCRSSI

SEQ ID NO: 1053 - protein, 24 aa, Homo sapiens
MLTGPPARVPAVPFDLHFCRSSIM

SEQ ID NO: 1054 - protein, 24 aa, Homo sapiens
LTGPPARVPAVPFDLHFCRSSIMK

SEQ ID NO: 1055 - protein, 24 aa, Homo sapiens
TGPPARVPAVPFDLHFCRSSIMKP

SEQ ID NO: 1056 - protein, 24 aa, Homo sapiens
GPPARVPAVPFDLHFCRSSIMKPK

SEQ ID NO: 1057 - protein, 24 aa, Homo sapiens
PPARVPAVPFDLHFCRSSIMKPKR

SEQ ID NO: 1058 - protein, 24 aa, Homo sapiens
PARVPAVPFDLHFCRSSIMKPKRD

SEQ ID NO: 1059 - protein, 24 aa, Homo sapiens
ARVPAVPFDLHFCRSSIMKPKRDG

SEQ ID NO: 1060 - protein, 24 aa, Homo sapiens
RVPAVPFDLHFCRSSIMKPKRDGY

SEQ ID NO: 1061 - protein, 24 aa, Homo sapiens
VPAVPFDLHFCRSSIMKPKRDGYM

SEQ ID NO: 1062 - protein, 24 aa, Homo sapiens
PAVPFDLHFCRSSIMKPKRDGYMF

SEQ ID NO: 1063 - protein, 24 aa, Homo sapiens
AVPFDLHFCRSSIMKPKRDGYMFL

SEQ ID NO: 1064 - protein, 24 aa, Homo sapiens
VPFDLHFCRSSIMKPKRDGYMFLK

SEQ ID NO: 1065 - protein, 24 aa, Homo sapiens
PFDLHFCRSSIMKPKRDGYMFLKA

SEQ ID NO: 1066 - protein, 24 aa, Homo sapiens
FDLHFCRSSIMKPKRDGYMFLKAE

SEQ ID NO: 1067 - protein, 24 aa, Homo sapiens
DLHFCRSSIMKPKRDGYMFLKAES

SEQ ID NO: 1068 - protein, 24 aa, Homo sapiens
LHFCRSSIMKPKRDGYMFLKAESK

SEQ ID NO: 1069 - protein, 24 aa, Homo sapiens
HFCRSSIMKPKRDGYMFLKAESKI

SEQ ID NO: 1070 - protein, 24 aa, Homo sapiens
FCRSSIMKPKRDGYMFLKAESKIM

SEQ ID NO: 1071 - protein, 24 aa, Homo sapiens
CRSSIMKPKRDGYMFLKAESKIMF

SEQ ID NO: 1072 - protein, 24 aa, Homo sapiens
RSSIMKPKRDGYMFLKAESKIMFA

SEQ ID NO: 1073 - protein, 24 aa, Homo sapiens
SSIMKPKRDGYMFLKAESKIMFAT

SEQ ID NO: 1074 - protein, 24 aa, Homo sapiens
SIMKPKRDGYMFLKAESKIMFATL

SEQ ID NO: 1075 - protein, 24 aa, Homo sapiens
IMKPKRDGYMFLKAESKIMFATLQ

SEQ ID NO: 1076 - protein, 24 aa, Homo sapiens
MKPKRDGYMFLKAESKIMFATLQR

SEQ ID NO: 1077 - protein, 24 aa, Homo sapiens
KPKRDGYMFLKAESKIMFATLQRS

SEQ ID NO: 1078 - protein, 24 aa, Homo sapiens
PKRDGYMFLKAESKIMFATLQRSS

SEQ ID NO: 1079 - protein, 24 aa, Homo sapiens
KRDGYMFLKAESKIMFATLQRSSL

SEQ ID NO: 1080 - protein, 24 aa, Homo sapiens
RDGYMFLKAESKIMFATLQRSSLW

SEQ ID NO: 1081 - protein, 24 aa, Homo sapiens
DGYMFLKAESKIMFATLQRSSLWC

SEQ ID NO: 1082 - protein, 24 aa, Homo sapiens
GYMFLKAESKIMFATLQRSSLWCL

SEQ ID NO: 1083 - protein, 24 aa, Homo sapiens
YMFLKAESKIMFATLQRSSLWCLC

SEQ ID NO: 1084 - protein, 24 aa, Homo sapiens
MFLKAESKIMFATLQRSSLWCLCS

SEQ ID NO: 1085 - protein, 24 aa, Homo sapiens
FLKAESKIMFATLQRSSLWCLCSN

SEQ ID NO: 1086 - protein, 24 aa, Homo sapiens
LKAESKIMFATLQRSSLWCLCSNH

SEQ ID NO: 1087 - protein, 25 aa, Homo sapiens
EPCSMLTGPPARVPAVPFDLHFCRS

SEQ ID NO: 1088 - protein, 25 aa, Homo sapiens
PCSMLTGPPARVPAVPFDLHFCRSS

SEQ ID NO: 1089 - protein, 25 aa, Homo sapiens
CSMLTGPPARVPAVPFDLHFCRSSI

SEQ ID NO: 1090 - protein, 25 aa, Homo sapiens
SMLTGPPARVPAVPFDLHFCRSSIM

SEQ ID NO: 1091 - protein, 25 aa, Homo sapiens
MLTGPPARVPAVPFDLHFCRSSIMK

SEQ ID NO: 1092 - protein, 25 aa, Homo sapiens
LTGPPARVPAVPFDLHFCRSSIMKP

SEQ ID NO: 1093 - protein, 25 aa, Homo sapiens
TGPPARVPAVPFDLHFCRSSIMKPK

SEQ ID NO: 1094 - protein, 25 aa, Homo sapiens
GPPARVPAVPFDLHFCRSSIMKPKR

SEQ ID NO: 1095 - protein, 25 aa, Homo sapiens
PPARVPAVPFDLHFCRSSIMKPKRD

SEQ ID NO: 1096 - protein, 25 aa, Homo sapiens
PARVPAVPFDLHFCRSSIMKPKRDG

SEQ ID NO: 1097 - protein, 25 aa, Homo sapiens
ARVPAVPFDLHFCRSSIMKPKRDGY

SEQ ID NO: 1098 - protein, 25 aa, Homo sapiens
RVPAVPFDLHFCRSSIMKPKRDGYM

SEQ ID NO: 1099 - protein, 25 aa, Homo sapiens
VPAVPFDLHFCRSSIMKPKRDGYMF

SEQ ID NO: 1100 - protein, 25 aa, Homo sapiens
PAVPFDLHFCRSSIMKPKRDGYMFL

SEQ ID NO: 1101 - protein, 25 aa, Homo sapiens
AVPFDLHFCRSSIMKPKRDGYMFLK

SEQ ID NO: 1102 - protein, 25 aa, Homo sapiens
VPFDLHFCRSSIMKPKRDGYMFLKA

SEQ ID NO: 1103 - protein, 25 aa, Homo sapiens
PFDLHFCRSSIMKPKRDGYMFLKAE

SEQ ID NO: 1104 - protein, 25 aa, Homo sapiens
FDLHFCRSSIMKPKRDGYMFLKAES

SEQ ID NO: 1105 - protein, 25 aa, Homo sapiens
DLHFCRSSIMKPKRDGYMFLKAESK

SEQ ID NO: 1106 - protein, 25 aa, Homo sapiens
LHFCRSSIMKPKRDGYMFLKAESKI

SEQ ID NO: 1107 - protein, 25 aa, Homo sapiens
HFCRSSIMKPKRDGYMFLKAESKIM

SEQ ID NO: 1108 - protein, 25 aa, Homo sapiens
FCRSSIMKPKRDGYMFLKAESKIMF

SEQ ID NO: 1109 - protein, 25 aa, Homo sapiens
CRSSIMKPKRDGYMFLKAESKIMFA

SEQ ID NO: 1110 - protein, 25 aa, Homo sapiens
RSSIMKPKRDGYMFLKAESKIMFAT

SEQ ID NO: 1111 - protein, 25 aa, Homo sapiens
SSIMKPKRDGYMFLKAESKIMFATL

SEQ ID NO: 1112 - protein, 25 aa, Homo sapiens
SIMKPKRDGYMFLKAESKIMFATLQ

SEQ ID NO: 1113 - protein, 25 aa, Homo sapiens
IMKPKRDGYMFLKAESKIMFATLQR

SEQ ID NO: 1114 - protein, 25 aa, Homo sapiens
MKPKRDGYMFLKAESKIMFATLQRS

SEQ ID NO: 1115 - protein, 25 aa, Homo sapiens
KPKRDGYMFLKAESKIMFATLQRSS

SEQ ID NO: 1116 - protein, 25 aa, Homo sapiens
PKRDGYMFLKAESKIMFATLQRSSL

SEQ ID NO: 1117 - protein, 25 aa, Homo sapiens
KRDGYMFLKAESKIMFATLQRSSLW

SEQ ID NO: 1118 - protein, 25 aa, Homo sapiens
RDGYMFLKAESKIMFATLQRSSLWC

SEQ ID NO: 1119 - protein, 25 aa, Homo sapiens
DGYMFLKAESKIMFATLQRSSLWCL

SEQ ID NO: 1120 - protein, 25 aa, Homo sapiens
GYMFLKAESKIMFATLQRSSLWCLC

SEQ ID NO: 1121 - protein, 25 aa, Homo sapiens
YMFLKAESKIMFATLQRSSLWCLCS

SEQ ID NO: 1122 - protein, 25 aa, Homo sapiens
MFLKAESKIMFATLQRSSLWCLCSN

SEQ ID NO: 1123 - protein, 25 aa, Homo sapiens
FLKAESKIMFATLQRSSLWCLCSNH

SEQ ID NO: 1124 - protein, 26 aa, Homo sapiens
EPCSMLTGPPARVPAVPFDLHFCRSS

SEQ ID NO: 1125 - protein, 26 aa, Homo sapiens
PCSMLTGPPARVPAVPFDLHFCRSSI

SEQ ID NO: 1126 - protein, 26 aa, Homo sapiens
CSMLTGPPARVPAVPFDLHFCRSSIM

SEQ ID NO: 1127 - protein, 26 aa, Homo sapiens
SMLTGPPARVPAVPFDLHFCRSSIMK

SEQ ID NO: 1128 - protein, 26 aa, Homo sapiens
MLTGPPARVPAVPFDLHFCRSSIMKP

SEQ ID NO: 1129 - protein, 26 aa, Homo sapiens
LTGPPARVPAVPFDLHFCRSSIMKPK

SEQ ID NO: 1130 - protein, 26 aa, Homo sapiens
TGPPARVPAVPFDLHFCRSSIMKPKR

SEQ ID NO: 1131 - protein, 26 aa, Homo sapiens
GPPARVPAVPFDLHFCRSSIMKPKRD

SEQ ID NO: 1132 - protein, 26 aa, Homo sapiens
PPARVPAVPFDLHFCRSSIMKPKRDG

SEQ ID NO: 1133 - protein, 26 aa, Homo sapiens
PARVPAVPFDLHFCRSSIMKPKRDGY

SEQ ID NO: 1134 - protein, 26 aa, Homo sapiens
ARVPAVPFDLHFCRSSIMKPKRDGYM

SEQ ID NO: 1135 - protein, 26 aa, Homo sapiens
RVPAVPFDLHFCRSSIMKPKRDGYMF

SEQ ID NO: 1136 - protein, 26 aa, Homo sapiens
VPAVPFDLHFCRSSIMKPKRDGYMFL

SEQ ID NO: 1137 - protein, 26 aa, Homo sapiens
PAVPFDLHFCRSSIMKPKRDGYMFLK

SEQ ID NO: 1138 - protein, 26 aa, Homo sapiens
AVPFDLHFCRSSIMKPKRDGYMFLKA

SEQ ID NO: 1139 - protein, 26 aa, Homo sapiens
VPFDLHFCRSSIMKPKRDGYMFLKAE

SEQ ID NO: 1140 - protein, 26 aa, Homo sapiens
PFDLHFCRSSIMKPKRDGYMFLKAES

SEQ ID NO: 1141 - protein, 26 aa, Homo sapiens
FDLHFCRSSIMKPKRDGYMFLKAESK

SEQ ID NO: 1142 - protein, 26 aa, Homo sapiens
DLHFCRSSIMKPKRDGYMFLKAESKI

SEQ ID NO: 1143 - protein, 26 aa, Homo sapiens
LHFCRSSIMKPKRDGYMFLKAESKIM

SEQ ID NO: 1144 - protein, 26 aa, Homo sapiens
HFCRSSIMKPKRDGYMFLKAESKIMF

SEQ ID NO: 1145 - protein, 26 aa, Homo sapiens
FCRSSIMKPKRDGYMFLKAESKIMFA

SEQ ID NO: 1146 - protein, 26 aa, Homo sapiens
CRSSIMKPKRDGYMFLKAESKIMFAT

SEQ ID NO: 1147 - protein, 26 aa, Homo sapiens
RSSIMKPKRDGYMFLKAESKIMFATL

SEQ ID NO: 1148 - protein, 26 aa, Homo sapiens
SSIMKPKRDGYMFLKAESKIMFATLQ

SEQ ID NO: 1149 - protein, 26 aa, Homo sapiens
SIMKPKRDGYMFLKAESKIMFATLQR

SEQ ID NO: 1150 - protein, 26 aa, Homo sapiens
IMKPKRDGYMFLKAESKIMFATLQRS

SEQ ID NO: 1151 - protein, 26 aa, Homo sapiens
MKPKRDGYMFLKAESKIMFATLQRSS

SEQ ID NO: 1152 - protein, 26 aa, Homo sapiens
KPKRDGYMFLKAESKIMFATLQRSSL

SEQ ID NO: 1153 - protein, 26 aa, Homo sapiens
PKRDGYMFLKAESKIMFATLQRSSLW

SEQ ID NO: 1154 - protein, 26 aa, Homo sapiens
KRDGYMFLKAESKIMFATLQRSSLWC

SEQ ID NO: 1155 - protein, 26 aa, Homo sapiens
RDGYMFLKAESKIMFATLQRSSLWCL

SEQ ID NO: 1156 - protein, 26 aa, Homo sapiens
DGYMFLKAESKIMFATLQRSSLWCLC

SEQ ID NO: 1157 - protein, 26 aa, Homo sapiens
GYMFLKAESKIMFATLQRSSLWCLCS

SEQ ID NO: 1158 - protein, 26 aa, Homo sapiens
YMFLKAESKIMFATLQRSSLWCLCSN

SEQ ID NO: 1159 - protein, 26 aa, Homo sapiens
MFLKAESKIMFATLQRSSLWCLCSNH

SEQ ID NO: 1160 - protein, 27 aa, Homo sapiens
EPCSMLTGPPARVPAVPFDLHFCRSSI

SEQ ID NO: 1161 - protein, 27 aa, Homo sapiens
PCSMLTGPPARVPAVPFDLHFCRSSIM

SEQ ID NO: 1162 - protein, 27 aa, Homo sapiens
CSMLTGPPARVPAVPFDLHFCRSSIMK

SEQ ID NO: 1163 - protein, 27 aa, Homo sapiens
SMLTGPPARVPAVPFDLHFCRSSIMKP

SEQ ID NO: 1164 - protein, 27 aa, Homo sapiens
MLTGPPARVPAVPFDLHFCRSSIMKPK

SEQ ID NO: 1165 - protein, 27 aa, Homo sapiens
LTGPPARVPAVPFDLHFCRSSIMKPKR

SEQ ID NO: 1166 - protein, 27 aa, Homo sapiens
TGPPARVPAVPFDLHFCRSSIMKPKRD

SEQ ID NO: 1167 - protein, 27 aa, Homo sapiens
GPPARVPAVPFDLHFCRSSIMKPKRDG

SEQ ID NO: 1168 - protein, 27 aa, Homo sapiens
PPARVPAVPFDLHFCRSSIMKPKRDGY

SEQ ID NO: 1169 - protein, 27 aa, Homo sapiens
PARVPAVPFDLHFCRSSIMKPKRDGYM

SEQ ID NO: 1170 - protein, 27 aa, Homo sapiens
ARVPAVPFDLHFCRSSIMKPKRDGYMF

SEQ ID NO: 1171 - protein, 27 aa, Homo sapiens
RVPAVPFDLHFCRSSIMKPKRDGYMFL

SEQ ID NO: 1172 - protein, 27 aa, Homo sapiens
VPAVPFDLHFCRSSIMKPKRDGYMFLK

SEQ ID NO: 1173 - protein, 27 aa, Homo sapiens
PAVPFDLHFCRSSIMKPKRDGYMFLKA

SEQ ID NO: 1174 - protein, 27 aa, Homo sapiens
AVPFDLHFCRSSIMKPKRDGYMFLKAE

SEQ ID NO: 1175 - protein, 27 aa, Homo sapiens
VPFDLHFCRSSIMKPKRDGYMFLKAES

SEQ ID NO: 1176 - protein, 27 aa, Homo sapiens
PFDLHFCRSSIMKPKRDGYMFLKAESK

SEQ ID NO: 1177 - protein, 27 aa, Homo sapiens
FDLHFCRSSIMKPKRDGYMFLKAESKI

SEQ ID NO: 1178 - protein, 27 aa, Homo sapiens
DLHFCRSSIMKPKRDGYMFLKAESKIM

SEQ ID NO: 1179 - protein, 27 aa, Homo sapiens
LHFCRSSIMKPKRDGYMFLKAESKIMF

SEQ ID NO: 1180 - protein, 27 aa, Homo sapiens
HFCRSSIMKPKRDGYMFLKAESKIMFA

SEQ ID NO: 1181 - protein, 27 aa, Homo sapiens
FCRSSIMKPKRDGYMFLKAESKIMFAT

SEQ ID NO: 1182 - protein, 27 aa, Homo sapiens
CRSSIMKPKRDGYMFLKAESKIMFATL

SEQ ID NO: 1183 - protein, 27 aa, Homo sapiens
RSSIMKPKRDGYMFLKAESKIMFATLQ

SEQ ID NO: 1184 - protein, 27 aa, Homo sapiens
SSIMKPKRDGYMFLKAESKIMFATLQR

SEQ ID NO: 1185 - protein, 27 aa, Homo sapiens
SIMKPKRDGYMFLKAESKIMFATLQRS

SEQ ID NO: 1186 - protein, 27 aa, Homo sapiens
IMKPKRDGYMFLKAESKIMFATLQRSS

SEQ ID NO: 1187 - protein, 27 aa, Homo sapiens
MKPKRDGYMFLKAESKIMFATLQRSSL

SEQ ID NO: 1188 - protein, 27 aa, Homo sapiens
KPKRDGYMFLKAESKIMFATLQRSSLW

SEQ ID NO: 1189 - protein, 27 aa, Homo sapiens
PKRDGYMFLKAESKIMFATLQRSSLWC

SEQ ID NO: 1190 - protein, 27 aa, Homo sapiens
KRDGYMFLKAESKIMFATLQRSSLWCL

SEQ ID NO: 1191 - protein, 27 aa, Homo sapiens
RDGYMFLKAESKIMFATLQRSSLWCLC

SEQ ID NO: 1192 - protein, 27 aa, Homo sapiens
DGYMFLKAESKIMFATLQRSSLWCLCS

SEQ ID NO: 1193 - protein, 27 aa, Homo sapiens
GYMFLKAESKIMFATLQRSSLWCLCSN

SEQ ID NO: 1194 - protein, 27 aa, Homo sapiens
YMFLKAESKIMFATLQRSSLWCLCSNH

SEQ ID NO: 1195 - protein, 28 aa, Homo sapiens
EPCSMLTGPPARVPAVPFDLHFCRSSIM

SEQ ID NO: 1196 - protein, 28 aa, Homo sapiens
PCSMLTGPPARVPAVPFDLHFCRSSIMK

SEQ ID NO: 1197 - protein, 28 aa, Homo sapiens
CSMLTGPPARVPAVPFDLHFCRSSIMKP

SEQ ID NO: 1198 - protein, 28 aa, Homo sapiens
SMLTGPPARVPAVPFDLHFCRSSIMKPK

SEQ ID NO: 1199 - protein, 28 aa, Homo sapiens
MLTGPPARVPAVPFDLHFCRSSIMKPKR

SEQ ID NO: 1200 - protein, 28 aa, Homo sapiens
LTGPPARVPAVPFDLHFCRSSIMKPKRD

SEQ ID NO: 1201 - protein, 28 aa, Homo sapiens
TGPPARVPAVPFDLHFCRSSIMKPKRDG

SEQ ID NO: 1202 - protein, 28 aa, Homo sapiens
GPPARVPAVPFDLHFCRSSIMKPKRDGY

SEQ ID NO: 1203 - protein, 28 aa, Homo sapiens
PPARVPAVPFDLHFCRSSIMKPKRDGYM

SEQ ID NO: 1204 - protein, 28 aa, Homo sapiens
PARVPAVPFDLHFCRSSIMKPKRDGYMF

SEQ ID NO: 1205 - protein, 28 aa, Homo sapiens
ARVPAVPFDLHFCRSSIMKPKRDGYMFL

SEQ ID NO: 1206 - protein, 28 aa, Homo sapiens
RVPAVPFDLHFCRSSIMKPKRDGYMFLK

SEQ ID NO: 1207 - protein, 28 aa, Homo sapiens
VPAVPFDLHFCRSSIMKPKRDGYMFLKA

SEQ ID NO: 1208 - protein, 28 aa, Homo sapiens
PAVPFDLHFCRSSIMKPKRDGYMFLKAE

SEQ ID NO: 1209 - protein, 28 aa, Homo sapiens
AVPFDLHFCRSSIMKPKRDGYMFLKAES

SEQ ID NO: 1210 - protein, 28 aa, Homo sapiens
VPFDLHFCRSSIMKPKRDGYMFLKAESK

SEQ ID NO: 1211 - protein, 28 aa, Homo sapiens
PFDLHFCRSSIMKPKRDGYMFLKAESKI

SEQ ID NO: 1212 - protein, 28 aa, Homo sapiens
FDLHFCRSSIMKPKRDGYMFLKAESKIM

SEQ ID NO: 1213 - protein, 28 aa, Homo sapiens
DLHFCRSSIMKPKRDGYMFLKAESKIMF

SEQ ID NO: 1214 - protein, 28 aa, Homo sapiens
LHFCRSSIMKPKRDGYMFLKAESKIMFA

SEQ ID NO: 1215 - protein, 28 aa, Homo sapiens
HFCRSSIMKPKRDGYMFLKAESKIMFAT

SEQ ID NO: 1216 - protein, 28 aa, Homo sapiens
FCRSSIMKPKRDGYMFLKAESKIMFATL

SEQ ID NO: 1217 - protein, 28 aa, Homo sapiens
CRSSIMKPKRDGYMFLKAESKIMFATLQ

SEQ ID NO: 1218 - protein, 28 aa, Homo sapiens
RSSIMKPKRDGYMFLKAESKIMFATLQR

SEQ ID NO: 1219 - protein, 28 aa, Homo sapiens
SSIMKPKRDGYMFLKAESKIMFATLQRS

SEQ ID NO: 1220 - protein, 28 aa, Homo sapiens
SIMKPKRDGYMFLKAESKIMFATLQRSS

SEQ ID NO: 1221 - protein, 28 aa, Homo sapiens
IMKPKRDGYMFLKAESKIMFATLQRSSL

SEQ ID NO: 1222 - protein, 28 aa, Homo sapiens
MKPKRDGYMFLKAESKIMFATLQRSSLW

SEQ ID NO: 1223 - protein, 28 aa, Homo sapiens
KPKRDGYMFLKAESKIMFATLQRSSLWC

SEQ ID NO: 1224 - protein, 28 aa, Homo sapiens
PKRDGYMFLKAESKIMFATLQRSSLWCL

SEQ ID NO: 1225 - protein, 28 aa, Homo sapiens
KRDGYMFLKAESKIMFATLQRSSLWCLC

SEQ ID NO: 1226 - protein, 28 aa, Homo sapiens
RDGYMFLKAESKIMFATLQRSSLWCLCS

SEQ ID NO: 1227 - protein, 28 aa, Homo sapiens
DGYMFLKAESKIMFATLQRSSLWCLCSN

SEQ ID NO: 1228 - protein, 28 aa, Homo sapiens
GYMFLKAESKIMFATLQRSSLWCLCSNH

SEQ ID NO: 1229 - protein, 29 aa, Homo sapiens
EPCSMLTGPPARVPAVPFDLHFCRSSIMK

SEQ ID NO: 1230 - protein, 29 aa, Homo sapiens
PCSMLTGPPARVPAVPFDLHFCRSSIMKP

SEQ ID NO: 1231 - protein, 29 aa, Homo sapiens
CSMLTGPPARVPAVPFDLHFCRSSIMKPK

SEQ ID NO: 1232 - protein, 29 aa, Homo sapiens
SMLTGPPARVPAVPFDLHFCRSSIMKPKR

SEQ ID NO: 1233 - protein, 29 aa, Homo sapiens
MLTGPPARVPAVPFDLHFCRSSIMKPKRD

SEQ ID NO: 1234 - protein, 29 aa, Homo sapiens
LTGPPARVPAVPFDLHFCRSSIMKPKRDG

SEQ ID NO: 1235 - protein, 29 aa, Homo sapiens
TGPPARVPAVPFDLHFCRSSIMKPKRDGY

SEQ ID NO: 1236 - protein, 29 aa, Homo sapiens
GPPARVPAVPFDLHFCRSSIMKPKRDGYM

SEQ ID NO: 1237 - protein, 29 aa, Homo sapiens
PPARVPAVPFDLHFCRSSIMKPKRDGYMF

SEQ ID NO: 1238 - protein, 29 aa, Homo sapiens
PARVPAVPFDLHFCRSSIMKPKRDGYMFL

SEQ ID NO: 1239 - protein, 29 aa, Homo sapiens
ARVPAVPFDLHFCRSSIMKPKRDGYMFLK

SEQ ID NO: 1240 - protein, 29 aa, Homo sapiens
RVPAVPFDLHFCRSSIMKPKRDGYMFLKA

SEQ ID NO: 1241 - protein, 29 aa, Homo sapiens
VPAVPFDLHFCRSSIMKPKRDGYMFLKAE

SEQ ID NO: 1242 - protein, 29 aa, Homo sapiens
PAVPFDLHFCRSSIMKPKRDGYMFLKAES

SEQ ID NO: 1243 - protein, 29 aa, Homo sapiens
AVPFDLHFCRSSIMKPKRDGYMFLKAESK

SEQ ID NO: 1244 - protein, 29 aa, Homo sapiens
VPFDLHFCRSSIMKPKRDGYMFLKAESKI

SEQ ID NO: 1245 - protein, 29 aa, Homo sapiens
PFDLHFCRSSIMKPKRDGYMFLKAESKIM

SEQ ID NO: 1246 - protein, 29 aa, Homo sapiens
FDLHFCRSSIMKPKRDGYMFLKAESKIMF

SEQ ID NO: 1247 - protein, 29 aa, Homo sapiens
DLHFCRSSIMKPKRDGYMFLKAESKIMFA

SEQ ID NO: 1248 - protein, 29 aa, Homo sapiens
LHFCRSSIMKPKRDGYMFLKAESKIMFAT

SEQ ID NO: 1249 - protein, 29 aa, Homo sapiens
HFCRSSIMKPKRDGYMFLKAESKIMFATL

SEQ ID NO: 1250 - protein, 29 aa, Homo sapiens
FCRSSIMKPKRDGYMFLKAESKIMFATLQ

SEQ ID NO: 1251 - protein, 29 aa, Homo sapiens
CRSSIMKPKRDGYMFLKAESKIMFATLQR

SEQ ID NO: 1252 - protein, 29 aa, Homo sapiens
RSSIMKPKRDGYMFLKAESKIMFATLQRS

SEQ ID NO: 1253 - protein, 29 aa, Homo sapiens
SSIMKPKRDGYMFLKAESKIMFATLQRSS

SEQ ID NO: 1254 - protein, 29 aa, Homo sapiens
SIMKPKRDGYMFLKAESKIMFATLQRSSL

SEQ ID NO: 1255 - protein, 29 aa, Homo sapiens
IMKPKRDGYMFLKAESKIMFATLQRSSLW

SEQ ID NO: 1256 - protein, 29 aa, Homo sapiens
MKPKRDGYMFLKAESKIMFATLQRSSLWC

SEQ ID NO: 1257 - protein, 29 aa, Homo sapiens
KPKRDGYMFLKAESKIMFATLQRSSLWCL

SEQ ID NO: 1258 - protein, 29 aa, Homo sapiens
PKRDGYMFLKAESKIMFATLQRSSLWCLC

SEQ ID NO: 1259 - protein, 29 aa, Homo sapiens
KRDGYMFLKAESKIMFATLQRSSLWCLCS

SEQ ID NO: 1260 - protein, 29 aa, Homo sapiens
RDGYMFLKAESKIMFATLQRSSLWCLCSN

SEQ ID NO: 1261 - protein, 29 aa, Homo sapiens
DGYMFLKAESKIMFATLQRSSLWCLCSNH

SEQ ID NO: 1262 - protein, 30 aa, Homo sapiens
EPCSMLTGPPARVPAVPFDLHFCRSSIMKP

SEQ ID NO: 1263 - protein, 30 aa, Homo sapiens
PCSMLTGPPARVPAVPFDLHFCRSSIMKPK

SEQ ID NO: 1264 - protein, 30 aa, Homo sapiens
CSMLTGPPARVPAVPFDLHFCRSSIMKPKR

SEQ ID NO: 1265 - protein, 30 aa, Homo sapiens
SMLTGPPARVPAVPFDLHFCRSSIMKPKRD

SEQ ID NO: 1266 - protein, 30 aa, Homo sapiens
MLTGPPARVPAVPFDLHFCRSSIMKPKRDG

SEQ ID NO: 1267 - protein, 30 aa, Homo sapiens
LTGPPARVPAVPFDLHFCRSSIMKPKRDGY

SEQ ID NO: 1268 - protein, 30 aa, Homo sapiens
TGPPARVPAVPFDLHFCRSSIMKPKRDGYM

SEQ ID NO: 1269 - protein, 30 aa, Homo sapiens
GPPARVPAVPFDLHFCRSSIMKPKRDGYMF

SEQ ID NO: 1270 - protein, 30 aa, Homo sapiens
PPARVPAVPFDLHFCRSSIMKPKRDGYMFL

SEQ ID NO: 1271 - protein, 30 aa, Homo sapiens
PARVPAVPFDLHFCRSSIMKPKRDGYMFLK

SEQ ID NO: 1272 - protein, 30 aa, Homo sapiens
ARVPAVPFDLHFCRSSIMKPKRDGYMFLKA

SEQ ID NO: 1273 - protein, 30 aa, Homo sapiens
RVPAVPFDLHFCRSSIMKPKRDGYMFLKAE

SEQ ID NO: 1274 - protein, 30 aa, Homo sapiens
VPAVPFDLHFCRSSIMKPKRDGYMFLKAES

SEQ ID NO: 1275 - protein, 30 aa, Homo sapiens
PAVPFDLHFCRSSIMKPKRDGYMFLKAESK

SEQ ID NO: 1276 - protein, 30 aa, Homo sapiens
AVPFDLHFCRSSIMKPKRDGYMFLKAESKI

SEQ ID NO: 1277 - protein, 30 aa, Homo sapiens
VPFDLHFCRSSIMKPKRDGYMFLKAESKIM

SEQ ID NO: 1278 - protein, 30 aa, Homo sapiens
PFDLHFCRSSIMKPKRDGYMFLKAESKIMF

SEQ ID NO: 1279 - protein, 30 aa, Homo sapiens
FDLHFCRSSIMKPKRDGYMFLKAESKIMFA

SEQ ID NO: 1280 - protein, 30 aa, Homo sapiens
DLHFCRSSIMKPKRDGYMFLKAESKIMFAT

SEQ ID NO: 1281 - protein, 30 aa, Homo sapiens
LHFCRSSIMKPKRDGYMFLKAESKIMFATL

SEQ ID NO: 1282 - protein, 30 aa, Homo sapiens
HFCRSSIMKPKRDGYMFLKAESKIMFATLQ

SEQ ID NO: 1283 - protein, 30 aa, Homo sapiens
FCRSSIMKPKRDGYMFLKAESKIMFATLQR

SEQ ID NO: 1284 - protein, 30 aa, Homo sapiens
CRSSIMKPKRDGYMFLKAESKIMFATLQRS

SEQ ID NO: 1285 - protein, 30 aa, Homo sapiens
RSSIMKPKRDGYMFLKAESKIMFATLQRSS

SEQ ID NO: 1286 - protein, 30 aa, Homo sapiens
SSIMKPKRDGYMFLKAESKIMFATLQRSSL

SEQ ID NO: 1287 - protein, 30 aa, Homo sapiens
SIMKPKRDGYMFLKAESKIMFATLQRSSLW

SEQ ID NO: 1288 - protein, 30 aa, Homo sapiens
IMKPKRDGYMFLKAESKIMFATLQRSSLWC

SEQ ID NO: 1289 - protein, 30 aa, Homo sapiens
MKPKRDGYMFLKAESKIMFATLQRSSLWCL

SEQ ID NO: 1290 - protein, 30 aa, Homo sapiens
KPKRDGYMFLKAESKIMFATLQRSSLWCLC

SEQ ID NO: 1291 - protein, 30 aa, Homo sapiens
PKRDGYMFLKAESKIMFATLQRSSLWCLCS

SEQ ID NO: 1292 - protein, 30 aa, Homo sapiens
KRDGYMFLKAESKIMFATLQRSSLWCLCSN

SEQ ID NO: 1293 - protein, 30 aa, Homo sapiens
RDGYMFLKAESKIMFATLQRSSLWCLCSNH

SEQ ID NO: 1294 - protein, 31 aa, Homo sapiens
EPCSMLTGPPARVPAVPFDLHFCRSSIMKPK

SEQ ID NO: 1295 - protein, 31 aa, Homo sapiens
PCSMLTGPPARVPAVPFDLHFCRSSIMKPKR

SEQ ID NO: 1296 - protein, 31 aa, Homo sapiens
CSMLTGPPARVPAVPFDLHFCRSSIMKPKRD

SEQ ID NO: 1297 - protein, 31 aa, Homo sapiens
SMLTGPPARVPAVPFDLHFCRSSIMKPKRDG

SEQ ID NO: 1298 - protein, 31 aa, Homo sapiens
MLTGPPARVPAVPFDLHFCRSSIMKPKRDGY

SEQ ID NO: 1299 - protein, 31 aa, Homo sapiens
LTGPPARVPAVPFDLHFCRSSIMKPKRDGYM

SEQ ID NO: 1300 - protein, 31 aa, Homo sapiens
TGPPARVPAVPFDLHFCRSSIMKPKRDGYMF

SEQ ID NO: 1301 - protein, 31 aa, Homo sapiens
GPPARVPAVPFDLHFCRSSIMKPKRDGYMFL

SEQ ID NO: 1302 - protein, 31 aa, Homo sapiens
PPARVPAVPFDLHFCRSSIMKPKRDGYMFLK

SEQ ID NO: 1303 - protein, 31 aa, Homo sapiens
PARVPAVPFDLHFCRSSIMKPKRDGYMFLKA

SEQ ID NO: 1304 - protein, 31 aa, Homo sapiens
ARVPAVPFDLHFCRSSIMKPKRDGYMFLKAE

SEQ ID NO: 1305 - protein, 31 aa, Homo sapiens
RVPAVPFDLHFCRSSIMKPKRDGYMFLKAES

SEQ ID NO: 1306 - protein, 31 aa, Homo sapiens
VPAVPFDLHFCRSSIMKPKRDGYMFLKAESK

SEQ ID NO: 1307 - protein, 31 aa, Homo sapiens
PAVPFDLHFCRSSIMKPKRDGYMFLKAESKI

SEQ ID NO: 1308 - protein, 31 aa, Homo sapiens
AVPFDLHFCRSSIMKPKRDGYMFLKAESKIM

SEQ ID NO: 1309 - protein, 31 aa, Homo sapiens
VPFDLHFCRSSIMKPKRDGYMFLKAESKIMF

SEQ ID NO: 1310 - protein, 31 aa, Homo sapiens
PFDLHFCRSSIMKPKRDGYMFLKAESKIMFA

SEQ ID NO: 1311 - protein, 31 aa, Homo sapiens
FDLHFCRSSIMKPKRDGYMFLKAESKIMFAT

SEQ ID NO: 1312 - protein, 31 aa, Homo sapiens
DLHFCRSSIMKPKRDGYMFLKAESKIMFATL

SEQ ID NO: 1313 - protein, 31 aa, Homo sapiens
LHFCRSSIMKPKRDGYMFLKAESKIMFATLQ

SEQ ID NO: 1314 - protein, 31 aa, Homo sapiens
HFCRSSIMKPKRDGYMFLKAESKIMFATLQR

SEQ ID NO: 1315 - protein, 31 aa, Homo sapiens
FCRSSIMKPKRDGYMFLKAESKIMFATLQRS

SEQ ID NO: 1316 - protein, 31 aa, Homo sapiens
CRSSIMKPKRDGYMFLKAESKIMFATLQRSS

SEQ ID NO: 1317 - protein, 31 aa, Homo sapiens
RSSIMKPKRDGYMFLKAESKIMFATLQRSSL

SEQ ID NO: 1318 - protein, 31 aa, Homo sapiens
SSIMKPKRDGYMFLKAESKIMFATLQRSSLW

SEQ ID NO: 1319 - protein, 31 aa, Homo sapiens
SIMKPKRDGYMFLKAESKIMFATLQRSSLWC

SEQ ID NO: 1320 - protein, 31 aa, Homo sapiens
IMKPKRDGYMFLKAESKIMFATLQRSSLWCL

SEQ ID NO: 1321 - protein, 31 aa, Homo sapiens
MKPKRDGYMFLKAESKIMFATLQRSSLWCLC

SEQ ID NO: 1322 - protein, 31 aa, Homo sapiens
KPKRDGYMFLKAESKIMFATLQRSSLWCLCS

SEQ ID NO: 1323 - protein, 31 aa, Homo sapiens
PKRDGYMFLKAESKIMFATLQRSSLWCLCSN

SEQ ID NO: 1324 - protein, 31 aa, Homo sapiens
KRDGYMFLKAESKIMFATLQRSSLWCLCSNH

SEQ ID NO: 1325 - protein, 32 aa, Homo sapiens
EPCSMLTGPPARVPAVPFDLHFCRSSIMKPKR

SEQ ID NO: 1326 - protein, 32 aa, Homo sapiens
PCSMLTGPPARVPAVPFDLHFCRSSIMKPKRD

SEQ ID NO: 1327 - protein, 32 aa, Homo sapiens
CSMLTGPPARVPAVPFDLHFCRSSIMKPKRDG

SEQ ID NO: 1328 - protein, 32 aa, Homo sapiens
SMLTGPPARVPAVPFDLHFCRSSIMKPKRDGY

SEQ ID NO: 1329 - protein, 32 aa, Homo sapiens
MLTGPPARVPAVPFDLHFCRSSIMKPKRDGYM

SEQ ID NO: 1330 - protein, 32 aa, Homo sapiens
LTGPPARVPAVPFDLHFCRSSIMKPKRDGYMF

SEQ ID NO: 1331 - protein, 32 aa, Homo sapiens
TGPPARVPAVPFDLHFCRSSIMKPKRDGYMFL

SEQ ID NO: 1332 - protein, 32 aa, Homo sapiens
GPPARVPAVPFDLHFCRSSIMKPKRDGYMFLK

SEQ ID NO: 1333 - protein, 32 aa, Homo sapiens
PPARVPAVPFDLHFCRSSIMKPKRDGYMFLKA

SEQ ID NO: 1334 - protein, 32 aa, Homo sapiens
PARVPAVPFDLHFCRSSIMKPKRDGYMFLKAE

SEQ ID NO: 1335 - protein, 32 aa, Homo sapiens
ARVPAVPFDLHFCRSSIMKPKRDGYMFLKAES

SEQ ID NO: 1336 - protein, 32 aa, Homo sapiens
RVPAVPFDLHFCRSSIMKPKRDGYMFLKAESK

SEQ ID NO: 1337 - protein, 32 aa, Homo sapiens
VPAVPFDLHFCRSSIMKPKRDGYMFLKAESKI

SEQ ID NO: 1338 - protein, 32 aa, Homo sapiens
PAVPFDLHFCRSSIMKPKRDGYMFLKAESKIM

SEQ ID NO: 1339 - protein, 32 aa, Homo sapiens
AVPFDLHFCRSSIMKPKRDGYMFLKAESKIMF

SEQ ID NO: 1340 - protein, 32 aa, Homo sapiens
VPFDLHFCRSSIMKPKRDGYMFLKAESKIMFA

SEQ ID NO: 1341 - protein, 32 aa, Homo sapiens
PFDLHFCRSSIMKPKRDGYMFLKAESKIMFAT

SEQ ID NO: 1342 - protein, 32 aa, Homo sapiens
FDLHFCRSSIMKPKRDGYMFLKAESKIMFATL

SEQ ID NO: 1343 - protein, 32 aa, Homo sapiens
DLHFCRSSIMKPKRDGYMFLKAESKIMFATLQ

SEQ ID NO: 1344 - protein, 32 aa, Homo sapiens
LHFCRSSIMKPKRDGYMFLKAESKIMFATLQR

SEQ ID NO: 1345 - protein, 32 aa, Homo sapiens
HFCRSSIMKPKRDGYMFLKAESKIMFATLQRS

SEQ ID NO: 1346 - protein, 32 aa, Homo sapiens
FCRSSIMKPKRDGYMFLKAESKIMFATLQRSS

SEQ ID NO: 1347 - protein, 32 aa, Homo sapiens
CRSSIMKPKRDGYMFLKAESKIMFATLQRSSL

SEQ ID NO: 1348 - protein, 32 aa, Homo sapiens
RSSIMKPKRDGYMFLKAESKIMFATLQRSSLW

SEQ ID NO: 1349 - protein, 32 aa, Homo sapiens
SSIMKPKRDGYMFLKAESKIMFATLQRSSLWC

SEQ ID NO: 1350 - protein, 32 aa, Homo sapiens
SIMKPKRDGYMFLKAESKIMFATLQRSSLWCL

SEQ ID NO: 1351 - protein, 32 aa, Homo sapiens
IMKPKRDGYMFLKAESKIMFATLQRSSLWCLC

SEQ ID NO: 1352 - protein, 32 aa, Homo sapiens
MKPKRDGYMFLKAESKIMFATLQRSSLWCLCS

SEQ ID NO: 1353 - protein, 32 aa, Homo sapiens
KPKRDGYMFLKAESKIMFATLQRSSLWCLCSN

SEQ ID NO: 1354 - protein, 32 aa, Homo sapiens
PKRDGYMFLKAESKIMFATLQRSSLWCLCSNH

SEQ ID NO: 1355 - protein, 33 aa, Homo sapiens
EPCSMLTGPPARVPAVPFDLHFCRSSIMKPKRD

SEQ ID NO: 1356 - protein, 33 aa, Homo sapiens
PCSMLTGPPARVPAVPFDLHFCRSSIMKPKRDG

SEQ ID NO: 1357 - protein, 33 aa, Homo sapiens
CSMLTGPPARVPAVPFDLHFCRSSIMKPKRDGY

SEQ ID NO: 1358 - protein, 33 aa, Homo sapiens
SMLTGPPARVPAVPFDLHFCRSSIMKPKRDGYM

SEQ ID NO: 1359 - protein, 33 aa, Homo sapiens
MLTGPPARVPAVPFDLHFCRSSIMKPKRDGYMF

SEQ ID NO: 1360 - protein, 33 aa, Homo sapiens
LTGPPARVPAVPFDLHFCRSSIMKPKRDGYMFL

SEQ ID NO: 1361 - protein, 33 aa, Homo sapiens
TGPPARVPAVPFDLHFCRSSIMKPKRDGYMFLK

SEQ ID NO: 1362 - protein, 33 aa, Homo sapiens
GPPARVPAVPFDLHFCRSSIMKPKRDGYMFLKA

SEQ ID NO: 1363 - protein, 33 aa, Homo sapiens
PPARVPAVPFDLHFCRSSIMKPKRDGYMFLKAE

SEQ ID NO: 1364 - protein, 33 aa, Homo sapiens
PARVPAVPFDLHFCRSSIMKPKRDGYMFLKAES

SEQ ID NO: 1365 - protein, 33 aa, Homo sapiens
ARVPAVPFDLHFCRSSIMKPKRDGYMFLKAESK

SEQ ID NO: 1366 - protein, 33 aa, Homo sapiens
RVPAVPFDLHFCRSSIMKPKRDGYMFLKAESKI

SEQ ID NO: 1367 - protein, 33 aa, Homo sapiens
VPAVPFDLHFCRSSIMKPKRDGYMFLKAESKIM

SEQ ID NO: 1368 - protein, 33 aa, Homo sapiens
PAVPFDLHFCRSSIMKPKRDGYMFLKAESKIMF

SEQ ID NO: 1369 - protein, 33 aa, Homo sapiens
AVPFDLHFCRSSIMKPKRDGYMFLKAESKIMFA

SEQ ID NO: 1370 - protein, 33 aa, Homo sapiens
VPFDLHFCRSSIMKPKRDGYMFLKAESKIMFAT

SEQ ID NO: 1371 - protein, 33 aa, Homo sapiens
PFDLHFCRSSIMKPKRDGYMFLKAESKIMFATL

SEQ ID NO: 1372 - protein, 33 aa, Homo sapiens
FDLHFCRSSIMKPKRDGYMFLKAESKIMFATLQ

SEQ ID NO: 1373 - protein, 33 aa, Homo sapiens
DLHFCRSSIMKPKRDGYMFLKAESKIMFATLQR

SEQ ID NO: 1374 - protein, 33 aa, Homo sapiens
LHFCRSSIMKPKRDGYMFLKAESKIMFATLQRS

SEQ ID NO: 1375 - protein, 33 aa, Homo sapiens
HFCRSSIMKPKRDGYMFLKAESKIMFATLQRSS

SEQ ID NO: 1376 - protein, 33 aa, Homo sapiens
FCRSSIMKPKRDGYMFLKAESKIMFATLQRSSL

SEQ ID NO: 1377 - protein, 33 aa, Homo sapiens
CRSSIMKPKRDGYMFLKAESKIMFATLQRSSLW

SEQ ID NO: 1378 - protein, 33 aa, Homo sapiens
RSSIMKPKRDGYMFLKAESKIMFATLQRSSLWC

SEQ ID NO: 1379 - protein, 33 aa, Homo sapiens
SSIMKPKRDGYMFLKAESKIMFATLQRSSLWCL

SEQ ID NO: 1380 - protein, 33 aa, Homo sapiens
SIMKPKRDGYMFLKAESKIMFATLQRSSLWCLC

SEQ ID NO: 1381 - protein, 33 aa, Homo sapiens
IMKPKRDGYMFLKAESKIMFATLQRSSLWCLCS

SEQ ID NO: 1382 - protein, 33 aa, Homo sapiens
MKPKRDGYMFLKAESKIMFATLQRSSLWCLCSN

SEQ ID NO: 1383 - protein, 33 aa, Homo sapiens; identical to SEQ ID NO: 71

SEQ ID NO: 1384 - protein, 34 aa, Homo sapiens
EPCSMLTGPPARVPAVPFDLHFCRSSIMKPKRDG

SEQ ID NO: 1385 - protein, 34 aa, Homo sapiens
PCSMLTGPPARVPAVPFDLHFCRSSIMKPKRDGY

SEQ ID NO: 1386 - protein, 34 aa, Homo sapiens
CSMLTGPPARVPAVPFDLHFCRSSIMKPKRDGYM

SEQ ID NO: 1387 - protein, 34 aa, Homo sapiens
SMLTGPPARVPAVPFDLHFCRSSIMKPKRDGYMF

SEQ ID NO: 1388 - protein, 34 aa, Homo sapiens
MLTGPPARVPAVPFDLHFCRSSIMKPKRDGYMFL

SEQ ID NO: 1389 - protein, 34 aa, Homo sapiens
LTGPPARVPAVPFDLHFCRSSIMKPKRDGYMFLK

SEQ ID NO: 1390 - protein, 34 aa, Homo sapiens
TGPPARVPAVPFDLHFCRSSIMKPKRDGYMFLKA

SEQ ID NO: 1391 - protein, 34 aa, Homo sapiens
GPPARVPAVPFDLHFCRSSIMKPKRDGYMFLKAE

SEQ ID NO: 1392 - protein, 34 aa, Homo sapiens
PPARVPAVPFDLHFCRSSIMKPKRDGYMFLKAES

SEQ ID NO: 1393 - protein, 34 aa, Homo sapiens
PARVPAVPFDLHFCRSSIMKPKRDGYMFLKAESK

SEQ ID NO: 1394 - protein, 34 aa, Homo sapiens
ARVPAVPFDLHFCRSSIMKPKRDGYMFLKAESKI

SEQ ID NO: 1395 - protein, 34 aa, Homo sapiens
RVPAVPFDLHFCRSSIMKPKRDGYMFLKAESKIM

SEQ ID NO: 1396 - protein, 34 aa, Homo sapiens
VPAVPFDLHFCRSSIMKPKRDGYMFLKAESKIMF

SEQ ID NO: 1397 - protein, 34 aa, Homo sapiens
PAVPFDLHFCRSSIMKPKRDGYMFLKAESKIMFA

SEQ ID NO: 1398 - protein, 34 aa, Homo sapiens
AVPFDLHFCRSSIMKPKRDGYMFLKAESKIMFAT

SEQ ID NO: 1399 - protein, 34 aa, Homo sapiens
VPFDLHFCRSSIMKPKRDGYMFLKAESKIMFATL

SEQ ID NO: 1400 - protein, 34 aa, Homo sapiens
PFDLHFCRSSIMKPKRDGYMFLKAESKIMFATLQ

SEQ ID NO: 1401 - protein, 34 aa, Homo sapiens
FDLHFCRSSIMKPKRDGYMFLKAESKIMFATLQR

SEQ ID NO: 1402 - protein, 34 aa, Homo sapiens
DLHFCRSSIMKPKRDGYMFLKAESKIMFATLQRS

SEQ ID NO: 1403 - protein, 34 aa, Homo sapiens
LHFCRSSIMKPKRDGYMFLKAESKIMFATLQRSS

SEQ ID NO: 1404 - protein, 34 aa, Homo sapiens
HFCRSSIMKPKRDGYMFLKAESKIMFATLQRSSL

SEQ ID NO: 1405 - protein, 34 aa, Homo sapiens
FCRSSIMKPKRDGYMFLKAESKIMFATLQRSSLW

SEQ ID NO: 1406 - protein, 34 aa, Homo sapiens
CRSSIMKPKRDGYMFLKAESKIMFATLQRSSLWC

SEQ ID NO: 1407 - protein, 34 aa, Homo sapiens
RSSIMKPKRDGYMFLKAESKIMFATLQRSSLWCL

SEQ ID NO: 1408 - protein, 34 aa, Homo sapiens
SSIMKPKRDGYMFLKAESKIMFATLQRSSLWCLC

SEQ ID NO: 1409 - protein, 34 aa, Homo sapiens
SIMKPKRDGYMFLKAESKIMFATLQRSSLWCLCS

SEQ ID NO: 1410 - protein, 34 aa, Homo sapiens
IMKPKRDGYMFLKAESKIMFATLQRSSLWCLCSN

SEQ ID NO: 1411 - protein, 34 aa, Homo sapiens
MKPKRDGYMFLKAESKIMFATLQRSSLWCLCSNH

SEQ ID NO: 1412 - protein, 35 aa, Homo sapiens
EPCSMLTGPPARVPAVPFDLHFCRSSIMKPKRDGY

SEQ ID NO: 1413 - protein, 35 aa, Homo sapiens
PCSMLTGPPARVPAVPFDLHFCRSSIMKPKRDGYM

SEQ ID NO: 1414 - protein, 35 aa, Homo sapiens
CSMLTGPPARVPAVPFDLHFCRSSIMKPKRDGYMF

SEQ ID NO: 1415 - protein, 35 aa, Homo sapiens
SMLTGPPARVPAVPFDLHFCRSSIMKPKRDGYMFL

SEQ ID NO: 1416 - protein, 35 aa, Homo sapiens
MLTGPPARVPAVPFDLHFCRSSIMKPKRDGYMFLK

SEQ ID NO: 1417 - protein, 35 aa, Homo sapiens
LTGPPARVPAVPFDLHFCRSSIMKPKRDGYMFLKA

SEQ ID NO: 1418 - protein, 35 aa, Homo sapiens
TGPPARVPAVPFDLHFCRSSIMKPKRDGYMFLKAE

SEQ ID NO: 1419 - protein, 35 aa, Homo sapiens
GPPARVPAVPFDLHFCRSSIMKPKRDGYMFLKAES

SEQ ID NO: 1420 - protein, 35 aa, Homo sapiens
PPARVPAVPFDLHFCRSSIMKPKRDGYMFLKAESK

SEQ ID NO: 1421 - protein, 35 aa, Homo sapiens
PARVPAVPFDLHFCRSSIMKPKRDGYMFLKAESKI

SEQ ID NO: 1422 - protein, 35 aa, Homo sapiens
ARVPAVPFDLHFCRSSIMKPKRDGYMFLKAESKIM

SEQ ID NO: 1423 - protein, 35 aa, Homo sapiens
RVPAVPFDLHFCRSSIMKPKRDGYMFLKAESKIMF

SEQ ID NO: 1424 - protein, 35 aa, Homo sapiens
VPAVPFDLHFCRSSIMKPKRDGYMFLKAESKIMFA

SEQ ID NO: 1425 - protein, 35 aa, Homo sapiens
PAVPFDLHFCRSSIMKPKRDGYMFLKAESKIMFAT

SEQ ID NO: 1426 - protein, 35 aa, Homo sapiens
AVPFDLHFCRSSIMKPKRDGYMFLKAESKIMFATL

SEQ ID NO: 1427 - protein, 35 aa, Homo sapiens
VPFDLHFCRSSIMKPKRDGYMFLKAESKIMFATLQ

SEQ ID NO: 1428 - protein, 35 aa, Homo sapiens
PFDLHFCRSSIMKPKRDGYMFLKAESKIMFATLQR

SEQ ID NO: 1429 - protein, 35 aa, Homo sapiens
FDLHFCRSSIMKPKRDGYMFLKAESKIMFATLQRS

SEQ ID NO: 1430 - protein, 35 aa, Homo sapiens
DLHFCRSSIMKPKRDGYMFLKAESKIMFATLQRSS

SEQ ID NO: 1431 - protein, 35 aa, Homo sapiens
LHFCRSSIMKPKRDGYMFLKAESKIMFATLQRSSL

SEQ ID NO: 1432 - protein, 35 aa, Homo sapiens
HFCRSSIMKPKRDGYMFLKAESKIMFATLQRSSLW

SEQ ID NO: 1433 - protein, 35 aa, Homo sapiens
FCRSSIMKPKRDGYMFLKAESKIMFATLQRSSLWC

SEQ ID NO: 1434 - protein, 35 aa, Homo sapiens
CRSSIMKPKRDGYMFLKAESKIMFATLQRSSLWCL

SEQ ID NO: 1435 - protein, 35 aa, Homo sapiens
RSSIMKPKRDGYMFLKAESKIMFATLQRSSLWCLC

SEQ ID NO: 1436 - protein, 35 aa, Homo sapiens
SSIMKPKRDGYMFLKAESKIMFATLQRSSLWCLCS

SEQ ID NO: 1437 - protein, 35 aa, Homo sapiens
SIMKPKRDGYMFLKAESKIMFATLQRSSLWCLCSN

SEQ ID NO: 1438 - protein, 35 aa, Homo sapiens
IMKPKRDGYMFLKAESKIMFATLQRSSLWCLCSNH

SEQ ID NO: 1439 - protein, 36 aa, Homo sapiens
EPCSMLTGPPARVPAVPFDLHFCRSSIMKPKRDGYM

SEQ ID NO: 1440 - protein, 36 aa, Homo sapiens
PCSMLTGPPARVPAVPFDLHFCRSSIMKPKRDGYMF

SEQ ID NO: 1441 - protein, 36 aa, Homo sapiens
CSMLTGPPARVPAVPFDLHFCRSSIMKPKRDGYMFL

SEQ ID NO: 1442 - protein, 36 aa, Homo sapiens
SMLTGPPARVPAVPFDLHFCRSSIMKPKRDGYMFLK

SEQ ID NO: 1443 - protein, 36 aa, Homo sapiens
MLTGPPARVPAVPFDLHFCRSSIMKPKRDGYMFLKA

SEQ ID NO: 1444 - protein, 36 aa, Homo sapiens
LTGPPARVPAVPFDLHFCRSSIMKPKRDGYMFLKAE

SEQ ID NO: 1445 - protein, 36 aa, Homo sapiens
TGPPARVPAVPFDLHFCRSSIMKPKRDGYMFLKAES

SEQ ID NO: 1446 - protein, 36 aa, Homo sapiens
GPPARVPAVPFDLHFCRSSIMKPKRDGYMFLKAESK

SEQ ID NO: 1447 - protein, 36 aa, Homo sapiens
PPARVPAVPFDLHFCRSSIMKPKRDGYMFLKAESKI

SEQ ID NO: 1448 - protein, 36 aa, Homo sapiens
PARVPAVPFDLHFCRSSIMKPKRDGYMFLKAESKIM

SEQ ID NO: 1449 - protein, 36 aa, Homo sapiens
ARVPAVPFDLHFCRSSIMKPKRDGYMFLKAESKIMF

SEQ ID NO: 1450 - protein, 36 aa, Homo sapiens
RVPAVPFDLHFCRSSIMKPKRDGYMFLKAESKIMFA

SEQ ID NO: 1451 - protein, 36 aa, Homo sapiens
VPAVPFDLHFCRSSIMKPKRDGYMFLKAESKIMFAT

SEQ ID NO: 1452 - protein, 36 aa, Homo sapiens
PAVPFDLHFCRSSIMKPKRDGYMFLKAESKIMFATL

SEQ ID NO: 1453 - protein, 36 aa, Homo sapiens
AVPFDLHFCRSSIMKPKRDGYMFLKAESKIMFATLQ

SEQ ID NO: 1454 - protein, 36 aa, Homo sapiens
VPFDLHFCRSSIMKPKRDGYMFLKAESKIMFATLQR

SEQ ID NO: 1455 - protein, 36 aa, Homo sapiens
PFDLHFCRSSIMKPKRDGYMFLKAESKIMFATLQRS

SEQ ID NO: 1456 - protein, 36 aa, Homo sapiens
FDLHFCRSSIMKPKRDGYMFLKAESKIMFATLQRSS

SEQ ID NO: 1457 - protein, 36 aa, Homo sapiens
DLHFCRSSIMKPKRDGYMFLKAESKIMFATLQRSSL

SEQ ID NO: 1458 - protein, 36 aa, Homo sapiens
LHFCRSSIMKPKRDGYMFLKAESKIMFATLQRSSLW

SEQ ID NO: 1459 - protein, 36 aa, Homo sapiens
HFCRSSIMKPKRDGYMFLKAESKIMFATLQRSSLWC

SEQ ID NO: 1460 - protein, 36 aa, Homo sapiens
FCRSSIMKPKRDGYMFLKAESKIMFATLQRSSLWCL

SEQ ID NO: 1461 - protein, 36 aa, Homo sapiens
CRSSIMKPKRDGYMFLKAESKIMFATLQRSSLWCLC

SEQ ID NO: 1462 - protein, 36 aa, Homo sapiens
RSSIMKPKRDGYMFLKAESKIMFATLQRSSLWCLCS

SEQ ID NO: 1463 - protein, 36 aa, Homo sapiens
SSIMKPKRDGYMFLKAESKIMFATLQRSSLWCLCSN

SEQ ID NO: 1464 - protein, 36 aa, Homo sapiens
SIMKPKRDGYMFLKAESKIMFATLQRSSLWCLCSNH

SEQ ID NO: 1465 - protein, 37 aa, Homo sapiens
EPCSMLTGPPARVPAVPFDLHFCRSSIMKPKRDGYMF

SEQ ID NO: 1466 - protein, 37 aa, Homo sapiens
PCSMLTGPPARVPAVPFDLHFCRSSIMKPKRDGYMFL

SEQ ID NO: 1467 - protein, 37 aa, Homo sapiens
CSMLTGPPARVPAVPFDLHFCRSSIMKPKRDGYMFLK

SEQ ID NO: 1468 - protein, 37 aa, Homo sapiens
SMLTGPPARVPAVPFDLHFCRSSIMKPKRDGYMFLKA

SEQ ID NO: 1469 - protein, 37 aa, Homo sapiens
MLTGPPARVPAVPFDLHFCRSSIMKPKRDGYMFLKAE

SEQ ID NO: 1470 - protein, 37 aa, Homo sapiens
LTGPPARVPAVPFDLHFCRSSIMKPKRDGYMFLKAES

SEQ ID NO: 1471 - protein, 37 aa, Homo sapiens
TGPPARVPAVPFDLHFCRSSIMKPKRDGYMFLKAESK

SEQ ID NO: 1472 - protein, 37 aa, Homo sapiens
GPPARVPAVPFDLHFCRSSIMKPKRDGYMFLKAESKI

SEQ ID NO: 1473 - protein, 37 aa, Homo sapiens
PPARVPAVPFDLHFCRSSIMKPKRDGYMFLKAESKIM

SEQ ID NO: 1474 - protein, 37 aa, Homo sapiens
PARVPAVPFDLHFCRSSIMKPKRDGYMFLKAESKIMF

SEQ ID NO: 1475 - protein, 37 aa, Homo sapiens
ARVPAVPFDLHFCRSSIMKPKRDGYMFLKAESKIMFA

SEQ ID NO: 1476 - protein, 37 aa, Homo sapiens
RVPAVPFDLHFCRSSIMKPKRDGYMFLKAESKIMFAT

SEQ ID NO: 1477 - protein, 37 aa, Homo sapiens
VPAVPFDLHFCRSSIMKPKRDGYMFLKAESKIMFATL

SEQ ID NO: 1478 - protein, 37 aa, Homo sapiens
PAVPFDLHFCRSSIMKPKRDGYMFLKAESKIMFATLQ

SEQ ID NO: 1479 - protein, 37 aa, Homo sapiens
AVPFDLHFCRSSIMKPKRDGYMFLKAESKIMFATLQR

SEQ ID NO: 1480 - protein, 37 aa, Homo sapiens
VPFDLHFCRSSIMKPKRDGYMFLKAESKIMFATLQRS

SEQ ID NO: 1481 - protein, 37 aa, Homo sapiens
PFDLHFCRSSIMKPKRDGYMFLKAESKIMFATLQRSS

SEQ ID NO: 1482 - protein, 37 aa, Homo sapiens
FDLHFCRSSIMKPKRDGYMFLKAESKIMFATLQRSSL

SEQ ID NO: 1483 - protein, 37 aa, Homo sapiens
DLHFCRSSIMKPKRDGYMFLKAESKIMFATLQRSSLW

SEQ ID NO: 1484 - protein, 37 aa, Homo sapiens
LHFCRSSIMKPKRDGYMFLKAESKIMFATLQRSSLWC

SEQ ID NO: 1485 - protein, 37 aa, Homo sapiens
HFCRSSIMKPKRDGYMFLKAESKIMFATLQRSSLWCL

SEQ ID NO: 1486 - protein, 37 aa, Homo sapiens
FCRSSIMKPKRDGYMFLKAESKIMFATLQRSSLWCLC

SEQ ID NO: 1487 - protein, 37 aa, Homo sapiens
CRSSIMKPKRDGYMFLKAESKIMFATLQRSSLWCLCS

SEQ ID NO: 1488 - protein, 37 aa, Homo sapiens
RSSIMKPKRDGYMFLKAESKIMFATLQRSSLWCLCSN

SEQ ID NO: 1489 - protein, 37 aa, Homo sapiens
SSIMKPKRDGYMFLKAESKIMFATLQRSSLWCLCSNH

SEQ ID NO: 1490 - protein, 38 aa, Homo sapiens
EPCSMLTGPPARVPAVPFDLHFCRSSIMKPKRDGYMFL

SEQ ID NO: 1491 - protein, 38 aa, Homo sapiens
PCSMLTGPPARVPAVPFDLHFCRSSIMKPKRDGYMFLK

SEQ ID NO: 1492 - protein, 38 aa, Homo sapiens
CSMLTGPPARVPAVPFDLHFCRSSIMKPKRDGYMFLKA

SEQ ID NO: 1493 - protein, 38 aa, Homo sapiens
SMLTGPPARVPAVPFDLHFCRSSIMKPKRDGYMFLKAE

SEQ ID NO: 1494 - protein, 38 aa, Homo sapiens
MLTGPPARVPAVPFDLHFCRSSIMKPKRDGYMFLKAES

SEQ ID NO: 1495 - protein, 38 aa, Homo sapiens
LTGPPARVPAVPFDLHFCRSSIMKPKRDGYMFLKAESK

SEQ ID NO: 1496 - protein, 38 aa, Homo sapiens
TGPPARVPAVPFDLHFCRSSIMKPKRDGYMFLKAESKI

SEQ ID NO: 1497 - protein, 38 aa, Homo sapiens
GPPARVPAVPFDLHFCRSSIMKPKRDGYMFLKAESKIM

SEQ ID NO: 1498 - protein, 38 aa, Homo sapiens
PPARVPAVPFDLHFCRSSIMKPKRDGYMFLKAESKIMF

SEQ ID NO: 1499 - protein, 38 aa, Homo sapiens
PARVPAVPFDLHFCRSSIMKPKRDGYMFLKAESKIMFA

SEQ ID NO: 1500 - protein, 38 aa, Homo sapiens
ARVPAVPFDLHFCRSSIMKPKRDGYMFLKAESKIMFAT

SEQ ID NO: 1501 - protein, 38 aa, Homo sapiens
RVPAVPFDLHFCRSSIMKPKRDGYMFLKAESKIMFATL

SEQ ID NO: 1502 - protein, 38 aa, Homo sapiens
VPAVPFDLHFCRSSIMKPKRDGYMFLKAESKIMFATLQ

SEQ ID NO: 1503 - protein, 38 aa, Homo sapiens
PAVPFDLHFCRSSIMKPKRDGYMFLKAESKIMFATLQR

SEQ ID NO: 1504 - protein, 38 aa, Homo sapiens
AVPFDLHFCRSSIMKPKRDGYMFLKAESKIMFATLQRS

SEQ ID NO: 1505 - protein, 38 aa, Homo sapiens
VPFDLHFCRSSIMKPKRDGYMFLKAESKIMFATLQRSS

SEQ ID NO: 1506 - protein, 38 aa, Homo sapiens
PFDLHFCRSSIMKPKRDGYMFLKAESKIMFATLQRSSL

SEQ ID NO: 1507 - protein, 38 aa, Homo sapiens
FDLHFCRSSIMKPKRDGYMFLKAESKIMFATLQRSSLW

SEQ ID NO: 1508 - protein, 38 aa, Homo sapiens
DLHFCRSSIMKPKRDGYMFLKAESKIMFATLQRSSLWC

SEQ ID NO: 1509 - protein, 38 aa, Homo sapiens
LHFCRSSIMKPKRDGYMFLKAESKIMFATLQRSSLWCL

SEQ ID NO: 1510 - protein, 38 aa, Homo sapiens
HFCRSSIMKPKRDGYMFLKAESKIMFATLQRSSLWCLC

SEQ ID NO: 1511 - protein, 38 aa, Homo sapiens
FCRSSIMKPKRDGYMFLKAESKIMFATLQRSSLWCLCS

SEQ ID NO: 1512 - protein, 38 aa, Homo sapiens
CRSSIMKPKRDGYMFLKAESKIMFATLQRSSLWCLCSN

SEQ ID NO: 1513 - protein, 38 aa, Homo sapiens
RSSIMKPKRDGYMFLKAESKIMFATLQRSSLWCLCSNH

SEQ ID NO: 1514 - protein, 39 aa, Homo sapiens
EPCSMLTGPPARVPAVPFDLHFCRSSIMKPKRDGYMFLK

SEQ ID NO: 1515 - protein, 39 aa, Homo sapiens
PCSMLTGPPARVPAVPFDLHFCRSSIMKPKRDGYMFLKA

SEQ ID NO: 1516 - protein, 39 aa, Homo sapiens
CSMLTGPPARVPAVPFDLHFCRSSIMKPKRDGYMFLKAE

SEQ ID NO: 1517 - protein, 39 aa, Homo sapiens
SMLTGPPARVPAVPFDLHFCRSSIMKPKRDGYMFLKAES

SEQ ID NO: 1518 - protein, 39 aa, Homo sapiens
MLTGPPARVPAVPFDLHFCRSSIMKPKRDGYMFLKAESK

SEQ ID NO: 1519 - protein, 39 aa, Homo sapiens
LTGPPARVPAVPFDLHFCRSSIMKPKRDGYMFLKAESKI

SEQ ID NO: 1520 - protein, 39 aa, Homo sapiens
TGPPARVPAVPFDLHFCRSSIMKPKRDGYMFLKAESKIM

SEQ ID NO: 1521 - protein, 39 aa, Homo sapiens
GPPARVPAVPFDLHFCRSSIMKPKRDGYMFLKAESKIMF

SEQ ID NO: 1522 - protein, 39 aa, Homo sapiens
PPARVPAVPFDLHFCRSSIMKPKRDGYMFLKAESKIMFA

SEQ ID NO: 1523 - protein, 39 aa, Homo sapiens
PARVPAVPFDLHFCRSSIMKPKRDGYMFLKAESKIMFAT

SEQ ID NO: 1524 - protein, 39 aa, Homo sapiens
ARVPAVPFDLHFCRSSIMKPKRDGYMFLKAESKIMFATL

SEQ ID NO: 1525 - protein, 39 aa, Homo sapiens
RVPAVPFDLHFCRSSIMKPKRDGYMFLKAESKIMFATLQ

SEQ ID NO: 1526 - protein, 39 aa, Homo sapiens
VPAVPFDLHFCRSSIMKPKRDGYMFLKAESKIMFATLQR

SEQ ID NO: 1527 - protein, 39 aa, Homo sapiens
PAVPFDLHFCRSSIMKPKRDGYMFLKAESKIMFATLQRS

SEQ ID NO: 1528 - protein, 39 aa, Homo sapiens
AVPFDLHFCRSSIMKPKRDGYMFLKAESKIMFATLQRSS

SEQ ID NO: 1529 - protein, 39 aa, Homo sapiens
VPFDLHFCRSSIMKPKRDGYMFLKAESKIMFATLQRSSL

SEQ ID NO: 1530 - protein, 39 aa, Homo sapiens
PFDLHFCRSSIMKPKRDGYMFLKAESKIMFATLQRSSLW

SEQ ID NO: 1531 - protein, 39 aa, Homo sapiens
FDLHFCRSSIMKPKRDGYMFLKAESKIMFATLQRSSLWC

SEQ ID NO: 1532 - protein, 39 aa, Homo sapiens
DLHFCRSSIMKPKRDGYMFLKAESKIMFATLQRSSLWCL

SEQ ID NO: 1533 - protein, 39 aa, Homo sapiens
LHFCRSSIMKPKRDGYMFLKAESKIMFATLQRSSLWCLC

SEQ ID NO: 1534 - protein, 39 aa, Homo sapiens
HFCRSSIMKPKRDGYMFLKAESKIMFATLQRSSLWCLCS

SEQ ID NO: 1535 - protein, 39 aa, Homo sapiens
FCRSSIMKPKRDGYMFLKAESKIMFATLQRSSLWCLCSN

SEQ ID NO: 1536 - protein, 39 aa, Homo sapiens
CRSSIMKPKRDGYMFLKAESKIMFATLQRSSLWCLCSNH

SEQ ID NO: 1537 - protein, 40 aa, Homo sapiens
EPCSMLTGPPARVPAVPFDLHFCRSSIMKPKRDGYMFLKA

SEQ ID NO: 1538 - protein, 40 aa, Homo sapiens
PCSMLTGPPARVPAVPFDLHFCRSSIMKPKRDGYMFLKAE

SEQ ID NO: 1539 - protein, 40 aa, Homo sapiens
CSMLTGPPARVPAVPFDLHFCRSSIMKPKRDGYMFLKAES

SEQ ID NO: 1540 - protein, 40 aa, Homo sapiens
SMLTGPPARVPAVPFDLHFCRSSIMKPKRDGYMFLKAESK

SEQ ID NO: 1541 - protein, 40 aa, Homo sapiens
MLTGPPARVPAVPFDLHFCRSSIMKPKRDGYMFLKAESKI

SEQ ID NO: 1542 - protein, 40 aa, Homo sapiens
LTGPPARVPAVPFDLHFCRSSIMKPKRDGYMFLKAESKIM

SEQ ID NO: 1543 - protein, 40 aa, Homo sapiens
TGPPARVPAVPFDLHFCRSSIMKPKRDGYMFLKAESKIMF

SEQ ID NO: 1544 - protein, 40 aa, Homo sapiens
GPPARVPAVPFDLHFCRSSIMKPKRDGYMFLKAESKIMFA

SEQ ID NO: 1545 - protein, 40 aa, Homo sapiens
PPARVPAVPFDLHFCRSSIMKPKRDGYMFLKAESKIMFAT

SEQ ID NO: 1546 - protein, 40 aa, Homo sapiens
PARVPAVPFDLHFCRSSIMKPKRDGYMFLKAESKIMFATL

SEQ ID NO: 1547 - protein, 40 aa, Homo sapiens
ARVPAVPFDLHFCRSSIMKPKRDGYMFLKAESKIMFATLQ

SEQ ID NO: 1548 - protein, 40 aa, Homo sapiens
RVPAVPFDLHFCRSSIMKPKRDGYMFLKAESKIMFATLQR

SEQ ID NO: 1549 - protein, 40 aa, Homo sapiens
VPAVPFDLHFCRSSIMKPKRDGYMFLKAESKIMFATLQRS

SEQ ID NO: 1550 - protein, 40 aa, Homo sapiens
PAVPFDLHFCRSSIMKPKRDGYMFLKAESKIMFATLQRSS

SEQ ID NO: 1551 - protein, 40 aa, Homo sapiens
AVPFDLHFCRSSIMKPKRDGYMFLKAESKIMFATLQRSSL

SEQ ID NO: 1552 - protein, 40 aa, Homo sapiens
VPFDLHFCRSSIMKPKRDGYMFLKAESKIMFATLQRSSLW

SEQ ID NO: 1553 - protein, 40 aa, Homo sapiens
PFDLHFCRSSIMKPKRDGYMFLKAESKIMFATLQRSSLWC

SEQ ID NO: 1554 - protein, 40 aa, Homo sapiens
FDLHFCRSSIMKPKRDGYMFLKAESKIMFATLQRSSLWCL

SEQ ID NO: 1555 - protein, 40 aa, Homo sapiens
DLHFCRSSIMKPKRDGYMFLKAESKIMFATLQRSSLWCLC

SEQ ID NO: 1556 - protein, 40 aa, Homo sapiens
LHFCRSSIMKPKRDGYMFLKAESKIMFATLQRSSLWCLCS

SEQ ID NO: 1557 - protein, 40 aa, Homo sapiens
HFCRSSIMKPKRDGYMFLKAESKIMFATLQRSSLWCLCSN

SEQ ID NO: 1558 - protein, 40 aa, Homo sapiens
FCRSSIMKPKRDGYMFLKAESKIMFATLQRSSLWCLCSNH

SEQ ID NO: 1559 - protein, 48 aa, Homo sapiens
AQAKAVCSQESRDVLCELSDHHNHTLEEECQWGPCLQCLWALLQASQY

SEQ ID NO: 1560 - protein, 113 aa, Homo sapiens; identical to SEQ ID NO: 2

SEQ ID NO: 1561 - protein, 9 aa, Homo sapiens
CLQCLWALL

SEQ ID NO: 1562 - protein, 10 aa, Homo sapiens
CQWGPCLQCL

SEQ ID NO: 1563 - protein, 9 aa, Homo sapiens
QWGPCLQCL

SEQ ID NO: 1564 - protein, 10 aa, Homo sapiens
QWGPCLQCLW

SEQ ID NO: 1565 - protein, 9 aa, Homo sapiens
AIQPVLWTT

SEQ ID NO: 1566 - protein, 9 aa, Homo sapiens
ALQPLQPHA

SEQ ID NO: 1567 - protein, 10 aa, Homo sapiens
DLHFCRSSIM

SEQ ID NO: 1568 - protein, 9 aa, Homo sapiens
EPHLALQPL

SEQ ID NO: 1569 - protein, 9 aa, Homo sapiens
ESKIMFATL

SEQ ID NO: 1570 - protein, 9 aa, Homo sapiens
FATLQRSSL

SEQ ID NO: 1571 - protein, 9 aa, Homo sapiens
FLKAESKIM

SEQ ID NO: 1572 - protein, 10 aa, Homo sapiens
FLKAESKIMF

SEQ ID NO: 1573 - protein, 9 aa, Homo sapiens
GPPARVPAV

SEQ ID NO: 1574 - protein, 10 aa, Homo sapiens
IMKPKRDGYM

SEQ ID NO: 1575 - protein, 9 aa, Homo sapiens
KIMFATLQR

SEQ ID NO: 1576 - protein, 9 aa, Homo sapiens
KPKRDGYMF

SEQ ID NO: 1577 - protein, 10 aa, Homo sapiens
KPKRDGYMFL

SEQ ID NO: 1578 - protein, 9 aa, Homo sapiens
LHFCRSSIM

SEQ ID NO: 1579 - protein, 9 aa, Homo sapiens
LQHGHRHGL

SEQ ID NO: 1580 - protein, 10 aa, Homo sapiens
MFATLQRSSL

SEQ ID NO: 1581 - protein, 9 aa, Homo sapiens
MFLKAESKI

SEQ ID NO: 1582 - protein, 9 aa, Homo sapiens
MLTGPPARV

SEQ ID NO: 1583 - protein, 10 aa, Homo sapiens
QPVLWTTPPL

SEQ ID NO: 1584 - protein, 10 aa, Homo sapiens
SMLTGPPARV

SEQ ID NO: 1585 - protein, 10 aa, Homo sapiens
TLQRSSLWCL

SEQ ID NO: 1586 - protein, 9 aa, Homo sapiens
VLPEPHLAL

SEQ ID NO: 1587 - protein, 10 aa, Homo sapiens
VPAVPFDLHF

SEQ ID NO: 1588 - protein, 9 aa, Homo sapiens
YMFLKAESK

SEQ ID NO: 1589 - protein, 10 aa, Homo sapiens
YMFLKAESKI

SEQ ID NO: 1590 - protein, 67 aa, Homo sapiens
MSDVAIVKEGWLHKRGKYIKTWRPRYFLLKNDGTFIGYKERPQDVDQREAPLNNFSVAQCQLMKTER

SEQ ID NO: 1591 - protein, 101 aa, Homo sapiens
TMLVLEGSGNLVLYTGVVRVGKVFIPGLPAPSLTMSNTMPRPSTPLDGVSAPKPLSKLLGSLDEVVLLSPVPELRDSSKLHDSLYNEDCTFQQLGTYIHSI

SEQ ID NO: 1592 - protein, 101 aa, Homo sapiens
HRIGGIKLRHQQWSLVMESVVPSDRGNYTCVVENKFGSIRQTYTLDVLERCPHRPILQAGLPANQTAVLGSDVEFHCKVYSDAQPHIQWLKHVEVNGSKVG

SEQ ID NO: 1593 - protein, 90 aa, Homo sapiens
MREPIYMHSTMVFLPWELHTKKGPSPPEQFMAVKLSDSRTALKSGYGKYLGINSDELVGHSDAIGPREQWEPVFQNGKMALLASNSCFIR

SEQ ID NO: 1594 - protein, 101 aa, Homo sapiens
AVKLSDSRIALKSGYGKYLGINSDELVGHSDAIGPREQWEPVFQNGKMALSASNSCFIRCNEAGDIEAKSKTAGEEEMIKIRSCAEKETKKKDDIPEEDKG

SEQ ID NO: 1595 - protein, 101 aa, Homo sapiens
AMPNQAQMRILKETELRKVKVLGSGAFGTVYKGIWIPDGENVKIPVAIKVSRENTSPKANKEILDEAYVMAGVGSPYVSRLLGICLTSTVQLVTQLMPYGC

SEQ ID NO: 1596 - protein, 101 aa, Homo sapiens
RVEEFKLKQMWKSPNGTIRNILGGTVFREAIICKNIPRLVSGWVKPIIIGGHAYGDQYRATDFVVPGPGKVEITYTPSDGTQKVTYLVHNFEEGGGVAMGM

SEQ ID NO: 1597 - protein, 62 aa, Homo sapiens
MTEYKLVVVGACGVGKSALTIQLIQNHFVDEYDPTIEDSYRKQVVIDGETCLLDILDTAGQE

SEQ ID NO: 1598 - protein, 62 aa, Homo sapiens
MTEYKLVVVGADGVGKSALTIQLIQNHFVDEYDPTIEDSYRKQVVIDGETCLLDILDTAGQE

SEQ ID NO: 1599 - protein, 62 aa, Homo sapiens
MTEYKLVVVGAVGVGKSALTIQLIQNHFVDEYDPTIEDSYRKQVVIDGETCLLDILDTAGQE

SEQ ID NO: 1600 - protein, 101 aa, Homo sapiens
AGGVGKSALTIQLIQNHFVDEYDPTIEDSYRKQVVIDGETCLLDILDTAGHEEYSAMRDQYMRTGEGFLCVFAINNTKSFEDIHHYREQIKRVKDSEDVPM

SEQ ID NO: 1601 - protein, 101 aa, Homo sapiens
AGGVGKSALTIQLIQNHFVDEYDPTIEDSYRKQVVIDGETCLLDILDTAGLEEYSAMRDQYMRTGEGFLCVFAINNTKSFEDIHHYREQIKRVKDSEDVPM

SEQ ID NO: 1602 - protein, 101 aa, Homo sapiens
AGGVGKSALTIQLIQNHFVDEYDPTIEDSYRKQVVIDGETCLLDILDTAGKEEYSAMRDQYMRTGEGFLCVFAINNSKSFADINLYREQIKRVKDSDDVPM

SEQ ID NO: 1603 - protein, 101 aa, Homo sapiens
AGGVGKSALTIQLIQNHFVDEYDPTIEDSYRKQVVIDGETCLLDILDTAGREEYSAMRDQYMRTGEGFLCVFAINNSKSFADINLYREQIKRVKDSDDVPM

SEQ ID NO: 1604 - protein, 101 aa, Homo sapiens
IEEHANWSVSREAGFSYSHAGLSNRLARDNELRENDKEQLKAISTRDPLSKITEQEKDFLWSHRHYCVTIPEILPKLLLSVKWNSRDEVAQMYCLVKDWPP

SEQ ID NO: 1605 - protein, 101 aa, Homo sapiens
KFNCRVAQYPFEDHNPPQLELIKPFCEDLDQWLSEDDNHVAAIHCKAGKGQTGVMICAYLLHRGKFLKAQEALDFYGEVRTRDKKGVTIPSQRRYVYYYSY

SEQ ID NO: 1606 - protein, 79 aa, Homo sapiens
MQAIKCVVVGDGAVGKTCLLISYTTNAFSGEYIPTVFDNYSANVMVDGKPVNLGLWDTAGQEDYDRLRPLSYPQTVGET

SEQ ID NO: 1607 - protein, 101 aa, Homo sapiens
AVCKSKKSWQARHTGIKIVQQIAILMGCAILPHLRSLVEIIEHGLVDEQQEVRTISALAIAALAEAATPYGIESFDSVLKPLWKGIRQHRGKGLAAFLKAI

SEQ ID NO: 1608 - protein, 101 aa, Homo sapiens
YLSLYLLLVSCPKSEVRAKFKFSILNAKGEETKAMESQRAYRFVQGKDWGLKKFIRRDFLLDEANGLLPDDKLTLFCEVSVVQDSVNISGQNTMNMVKVPE

SEQ ID NO: 1609 - protein, 101 aa, Homo sapiens
YLSLYLLLVSCPKSEVRAKFKFSILNAKGEETKAMESQRAYRFVQGKDWGVKKFIRRDFLLDEANGLLPDDKLTLFCEVSVVQDSVNISGQNTMNMVKVPE

SEQ ID NO: 1610 - protein, 101 aa, Homo sapiens
IRVEGNLRVEYLDDRNTFRHSVVVPYEPPEVGSDCTTIHYNYMCNSSCMGSMNRRPILTIITLEDSSGNLLGRNSFEVRVCACPGRDRRTEEENLRKKGEP

SEQ ID NO: 1611 - protein, 101 aa, Homo sapiens
EGNLRVEYLDDRNTFRHSVVVPYEPPEVGSDCTTIHYNYMCNSSCMGGMNQRPILTIITLEDSSGNLLGRNSFEVRVCACPGRDRRTEEENLRKKGEPHHE

SEQ ID NO: 1612 - protein, 101 aa, Homo sapiens
EGNLRVEYLDDRNTFRHSVVVPYEPPEVGSDCTTIHYNYMCNSSCMGGMNWRPILTIITLEDSSGNLLGRNSFEVRVCACPGRDRRTEEENLRKKGEPHHE

SEQ ID NO: 1613 - protein, 101 aa, Homo sapiens
PEVGSDCTTIHYNYMCNSSCMGGMNRRPILTIITLEDSSGNLLGRNSFEVCVCACPGRDRRTEEENLRKKGEPHHELPPGSTKRALPNNTSSSPQPKKKPL

SEQ ID NO: 1614 - protein, 101 aa, Homo sapiens
PEVGSDCTTIHYNYMCNSSCMGGMNRRPILTIITLEDSSGNLLGRNSFEVHVCACPGRDRRTEEENLRKKGEPHHELPPGSTKRALPNNTSSSPQPKKKPL

SEQ ID NO: 1615 - protein, 101 aa, Homo sapiens
TEVVRRCPHHERCSDSDGLAPPQHLIRVEGNLRVEYLDDRNTFRHSVVVPCEPPEVGSDCTTIHYNYMCNSSCMGGMNRRPILTIITLEDSSGNLLGRNSF

SEQ ID NO: 1616 - protein, 54 aa, Homo sapiens
YNFDKNYKDWQSAVECIAVLDVLLCLANYSRGGDGPMCRPVILLPEDTPPLLRA

SEQ ID NO: 1617 - protein, 93 aa, Homo sapiens
AKFQQCHSTLEPNPADCRVLVYLQNQPGTKLLNFLQERNLPPKVVLRHPKVHLNTMFRRPHSCLADVLLSVHLIVLRVVRLPAPFRVNHAVEW

SEQ ID NO: 1618 - protein, 179 aa, Homo sapiens
ALGPHSRISCLPTQTRGCILLAATPRSSSSSSSNDMIPMAISSPPKAPLLAAPSPASRLQCINSNSRITSGQWMAHMALLPSGTKGRCTACHTALGRGSLSSSSCPQPSPSLPASNKLPSLPLSKMYTTSMAMPILPLPQLLLSADQQAAPRTNFHSSLAETVSLHPLAPMPSKTCHHK

SEQ ID NO: 1619 - protein, 67 aa, Homo sapiens
RSYRRMIHLWWTAQISLGVCRSLTVACCTGGLVGGTPLSISRPTSRARQSCCLPGLTHPAHQPLGSM

SEQ ID NO: 1620 - protein, 60 aa, Homo sapiens
QHSGRDVSLRGLSCARATLSFWPGGYPAYSKDSGLLTSSSREWKVKFPELLCVWVSSIRH

SEQ ID NO: 1621 - protein, 48 aa, Homo sapiens; identical to SEQ ID NO: 1559

SEQ ID NO: 1622 - protein, 113 aa, Homo sapiens; identical to SEQ ID NO: 2

SEQ ID NO: 1623 - protein, 494 aa, Homo sapiens
TRRCHCCPHLRSHPCPHHLRNHPRPHHLRHHACHHHLRNCPHPHFLRHCTCPGRWRNRPSLRRLRSLLCLPHLNHHLFLHWRSRPCLHRKSHPHLLHLRRLYPHHLKHRPCPHHLKNLLCPRHLRNCPLPRHLKHLACLHHLRSHPCPLHLKSHPCLHHRRHLVCSHHLKSLLCPLHLRSLPFPHHLRHHACPHHLRTRLCPHHLKNHLCPPHLRYRAYPPCLWCHACLHRLRNLPCPHRLRSLPRPLHLRLHASPHHLRTPPHPHHLRTHLLPHHRRTRSCPCRWRSHPCCHYLRSRNSAPGPRGRTCHPGLRSRTCPPGLRSHTYLRRLRSHTCPPSLRSHAYALCLRSHTCPPRLRDHICPLSLRNCTCPPRLRSRTCLLCLRSHACPPNLRNHTCPPSLRSHACPPGLRNRICPLSLRSHPCPLGLKSPLRSQANALHLRSCPCSLPLGNHPYLPCLESQPCLSLGNHLCPLCPRSCRCPHLGSHPCRLS

SEQ ID NO: 1624 - protein, 35 aa, Homo sapiens
GPRSHPLPRLWHLLLQVTQTSFALAPTLTHMLSPH

SEQ ID NO: 1625 - protein, 172 aa, Homo sapiens
PLGLVPWTRWCPQGKPRFPAMSTTTATGTTTTKSGSSGMAGSLAQKPESPSPGLLFLGHSPSQSHLLLISKSPDPTQQPLRGGSLTHSAPGPSLSQPLAQLTPPASAPVPAVCSTCKNPASLPDTHRGKGGGVPPSPPLALGPRMQLCTQLARFFPITPPVWHILGPQRHTP

SEQ ID NO: 1626 - protein, 97 aa, Homo sapiens
KYEKKKYYDKNAIAITNISSSDAPLQPLVSSPSLQAAVDKNKLEKEKEKKRKRKREKRSQKSRQNHLQLKSCRRKISNWSLKKVPALKKLRSPLWIF

SEQ ID NO: 1627 - protein, 78 aa, Homo sapiens
CCPRTILNNGSLKTQVQMKLPECQRLLPPWPLHQQLLHRRPLHQPPPGPCHLLSLPRKPTRAATVSVWASCILGQPSL

SEQ ID NO: 1628 - protein, 46 aa, Homo sapiens
LARTPLPSTRCFANWPRPALCSCGLIPHPRPAPASAPWPSTSSHST

SEQ ID NO: 1629 - protein, 77 aa, Homo sapiens
SQGLYSSSASSGKCLMEVTVDRNCLEVLPTKMSYAANLKNVMNMQNRQKKKGKNSPCCQKKLRVQNQGHLLMILLHN

SEQ ID NO: 1630 - protein, 91 aa, Homo sapiens
TRASPPRSSSAIAVRASCCPYGSTSTASRSPTQRCRLARAAASTATEVTFGSSEMQGHTMGFWLTKLNYLCHLSMLTDSLFLPISHCQCIL

SEQ ID NO: 1631 - protein, 104 aa, Homo sapiens
LGSGAFGTVYKGIWIPDGENVKIPVAIKVLRENTSPKANKEILDEAYVMAYVMAGVGSPYVSRLLGICLTSTVQLVTQLMPYGCLLDHVRENRGRLGSQDLLNW

SEQ ID NO: 1632 - protein, 10 aa, Homo sapiens
KYIKTWRPRY

SEQ ID NO: 1633 - protein, 9 aa, Homo sapiens
WLHKRGKYI

SEQ ID NO: 1634 - protein, 10 aa, Homo sapiens
WLHKRGKYIK

SEQ ID NO: 1635 - protein, 9 aa, Homo sapiens
APKPLSKLL

SEQ ID NO: 1636 - protein, 10 aa, Homo sapiens
GVSAPKPLSK

SEQ ID NO: 1637 - protein, 9 aa, Homo sapiens
VSAPKPLSK

SEQ ID NO: 1638 - protein, 9 aa, Homo sapiens
CPHRPILQA

SEQ ID NO: 1639 - protein, 9 aa, Homo sapiens
KLSDSRTAL

SEQ ID NO: 1640 - protein, 10 aa, Homo sapiens
KLSDSRTALK

SEQ ID NO: 1641 - protein, 9 aa, Homo sapiens
LSDSRTALK

SEQ ID NO: 1642 - protein, 10 aa, Homo sapiens
RTALKSGYGK

SEQ ID NO: 1643 - protein, 9 aa, Homo sapiens
TALKSGYGK

SEQ ID NO: 1644 - protein, 9 aa, Homo sapiens
ALSASNSCF

SEQ ID NO: 1645 - protein, 10 aa, Homo sapiens
ALSASNSCFI

SEQ ID NO: 1646 - protein, 10 aa, Homo sapiens
FQNGKMALSA

SEQ ID NO: 1647 - protein, 10 aa, Homo sapiens
KVSRENTSPK

SEQ ID NO: 1648 - protein, 10 aa, Homo sapiens
KPIIIGGHAY

SEQ ID NO: 1649 - protein, 10 aa, Homo sapiens
KLVVVGACGV

SEQ ID NO: 1650 - protein, 9 aa, Homo sapiens
LVVVGACGV

SEQ ID NO: 1651 - protein, 9 aa, Homo sapiens
VVGACGVGK

SEQ ID NO: 1652 - protein, 10 aa, Homo sapiens
VVVGACGVGK

SEQ ID NO: 1653 - protein, 9 aa, Homo sapiens
VVGADGVGK

SEQ ID NO: 1654 - protein, 10 aa, Homo sapiens
VVVGADGVGK

SEQ ID NO: 1655 - protein, 10 aa, Homo sapiens
KLVVVGADGV

SEQ ID NO: 1656 - protein, 9 aa, Homo sapiens
LVVVGADGV

SEQ ID NO: 1657 - protein, 10 aa, Homo sapiens
KLVVVGAVGV

SEQ ID NO: 1658 - protein, 9 aa, Homo sapiens
LVVVGAVGV

SEQ ID NO: 1659 - protein, 9 aa, Homo sapiens
VVGAVGVGK

SEQ ID NO: 1660 - protein, 10 aa, Homo sapiens
VVVGAVGVGK

SEQ ID NO: 1661 - protein, 10 aa, Homo sapiens
ILDTAGHEEY

SEQ ID NO: 1662 - protein, 10 aa, Homo sapiens
ILDTAGLEEY

SEQ ID NO: 1663 - protein, 10 aa, Homo sapiens
LLDILDTAGL

SEQ ID NO: 1664 - protein, 10 aa, Homo sapiens
ILDTAGKEEY

SEQ ID NO: 1665 - protein, 10 aa, Homo sapiens
ILDTAGREEY

SEQ ID NO: 1666 - protein, 10 aa, Homo sapiens
AISTRDPLSK

SEQ ID NO: 1667 - protein, 9 aa, Homo sapiens
QTGVMICAY

SEQ ID NO: 1668 - protein, 9 aa, Homo sapiens
FSGEYIPTV

SEQ ID NO: 1669 - protein, 9 aa, Homo sapiens
TTNAFSGEY

SEQ ID NO: 1670 - protein, 10 aa, Homo sapiens
YTTNAFSGEY

SEQ ID NO: 1671 - protein, 9 aa, Homo sapiens
GLVDEQQEV

SEQ ID NO: 1672 - protein, 9 aa, Homo sapiens
FVQGKDWGL

SEQ ID NO: 1673 - protein, 9 aa, Homo sapiens
FVQGKDWGV

SEQ ID NO: 1674 - protein, 10 aa, Homo sapiens
CMGSMNRRPI

SEQ ID NO: 1675 - protein, 9 aa, Homo sapiens
GSMNRRPIL

SEQ ID NO: 1676 - protein, 9 aa, Homo sapiens
MGSMNRRPI

SEQ ID NO: 1677 - protein, 10 aa, Homo sapiens
MGSMNRRPIL

SEQ ID NO: 1678 - protein, 10 aa, Homo sapiens
SMNRRPILTI

SEQ ID NO: 1679 - protein, 10 aa, Homo sapiens
CMGGMNQRPI

SEQ ID NO: 1680 - protein, 10 aa, Homo sapiens
GMNQRPILTI

SEQ ID NO: 1681 - protein, 9 aa, Homo sapiens
NQRPILTII

SEQ ID NO: 1682 - protein, 10 aa, Homo sapiens
CMGGMNWRPI

SEQ ID NO: 1683 - protein, 10 aa, Homo sapiens
GMNWRPILTI

SEQ ID NO: 1684 - protein, 9 aa, Homo sapiens
MNWRPILTI

SEQ ID NO: 1685 - protein, 10 aa, Homo sapiens
MNWRPILTII

SEQ ID NO: 1686 - protein, 9 aa, Homo sapiens
NSFEVCVCA

SEQ ID NO: 1687 - protein, 9 aa, Homo sapiens
NSFEVHVCA

SEQ ID NO: 1688 - protein, 9 aa, Homo sapiens
VVPCEPPEV

SEQ ID NO: 1689 - protein, 10 aa, Homo sapiens
VVVPCEPPEV

SEQ ID NO: 1690 - protein, 10 aa, Homo sapiens
ILLPEDTPPL

SEQ ID NO: 1691 - protein, 9 aa, Homo sapiens
LLPEDTPPL

SEQ ID NO: 1692 - protein, 9 aa, Homo sapiens
APFRVNHAV

SEQ ID NO: 1693 - protein, 9 aa, Homo sapiens
CLADVLLSV

SEQ ID NO: 1694 - protein, 10 aa, Homo sapiens
FLQERNLPPK

SEQ ID NO: 1695 - protein, 10 aa, Homo sapiens
HLIVLRVVRL

SEQ ID NO: 1696 - protein, 9 aa, Homo sapiens
HPKVHLNTM

SEQ ID NO: 1697 - protein, 10 aa, Homo sapiens
HPKVHLNTMF

SEQ ID NO: 1698 - protein, 9 aa, Homo sapiens
KVHLNTMFR

SEQ ID NO: 1699 - protein, 10 aa, Homo sapiens
KVHLNTMFRR

SEQ ID NO: 1700 - protein, 10 aa, Homo sapiens
LPAPFRVNHA

SEQ ID NO: 1701 - protein, 9 aa, Homo sapiens
MFRRPHSCL

SEQ ID NO: 1702 - protein, 10 aa, Homo sapiens
MFRRPHSCLA

SEQ ID NO: 1703 - protein, 10 aa, Homo sapiens
NTMFRRPHSC

SEQ ID NO: 1704 - protein, 9 aa, Homo sapiens
RPHSCLADV

SEQ ID NO: 1705 - protein, 10 aa, Homo sapiens
RPHSCLADVL

SEQ ID NO: 1706 - protein, 10 aa, Homo sapiens
RVVRLPAPFR

SEQ ID NO: 1707 - protein, 9 aa, Homo sapiens
SVHLIVLRV

SEQ ID NO: 1708 - protein, 9 aa, Homo sapiens
TMFRRPHSC

SEQ ID NO: 1709 - protein, 10 aa, Homo sapiens
TMFRRPHSCL

SEQ ID NO: 1710 - protein, 9 aa, Homo sapiens
VLLSVHLIV

SEQ ID NO: 1711 - protein, 10 aa, Homo sapiens
VLLSVHLIVL

SEQ ID NO: 1712 - protein, 9 aa, Homo sapiens
VLRVVRLPA

SEQ ID NO: 1713 - protein, 9 aa, Homo sapiens
VVRLPAPFR

SEQ ID NO: 1714 - protein, 10 aa, Homo sapiens
AMPILPLPQL

SEQ ID NO: 1715 - protein, 10 aa, Homo sapiens
APLLAAPSPA

SEQ ID NO: 1716 - protein, 9 aa, Homo sapiens
APRTNFHSS

SEQ ID NO: 1717 - protein, 10 aa, Homo sapiens
APRTNFHSSL

SEQ ID NO: 1718 - protein, 10 aa, Homo sapiens
CPQPSPSLPA

SEQ ID NO: 1719 - protein, 9 aa, Homo sapiens
GQWMAHMAL

SEQ ID NO: 1720 - protein, 10 aa, Homo sapiens
GQWMAHMALL

SEQ ID NO: 1721 - protein, 10 aa, Homo sapiens
HMALLPSGTK

SEQ ID NO: 1722 - protein, 9 aa, Homo sapiens
HTALGRGSL

SEQ ID NO: 1723 - protein, 9 aa, Homo sapiens
IPMAISSPP

SEQ ID NO: 1724 - protein, 10 aa, Homo sapiens
IPMAISSPPK

SEQ ID NO: 1725 - protein, 9 aa, Homo sapiens
KLPSLPLSK

SEQ ID NO: 1726 - protein, 10 aa, Homo sapiens
KLPSLPLSKM

SEQ ID NO: 1727 - protein, 9 aa, Homo sapiens
KMYTTSMAM

SEQ ID NO: 1728 - protein, 10 aa, Homo sapiens
LLAAPSPASR

SEQ ID NO: 1729 - protein, 10 aa, Homo sapiens
LLLSADQQAA

SEQ ID NO: 1730 - protein, 9 aa, Homo sapiens
LLSADQQAA

SEQ ID NO: 1731 - protein, 9 aa, Homo sapiens
LPASNKLPS

SEQ ID NO: 1732 - protein, 10 aa, Homo sapiens
LPASNKLPSL

SEQ ID NO: 1733 - protein, 10 aa, Homo sapiens
LPLPQLLLSA

SEQ ID NO: 1734 - protein, 9 aa, Homo sapiens
LPSLPLSKM

SEQ ID NO: 1735 - protein, 9 aa, Homo sapiens
LSKMYTTSM

SEQ ID NO: 1736 - protein, 9 aa, Homo sapiens
MALLPSGTK

SEQ ID NO: 1737 - protein, 9 aa, Homo sapiens
MPILPLPQL

SEQ ID NO: 1738 - protein, 10 aa, Homo sapiens
MPILPLPQLL

SEQ ID NO: 1739 - protein, 10 aa, Homo sapiens
MYTTSMAMPI

SEQ ID NO: 1740 - protein, 9 aa, Homo sapiens
PMAISSPPK

SEQ ID NO: 1741 - protein, 9 aa, Homo sapiens
QWMAHMALL

SEQ ID NO: 1742 - protein, 10 aa, Homo sapiens
SKMYTTSMAM

SEQ ID NO: 1743 - protein, 9 aa, Homo sapiens
SMAMPILPL

SEQ ID NO: 1744 - protein, 9 aa, Homo sapiens
SNKLPSLPL

SEQ ID NO: 1745 - protein, 9 aa, Homo sapiens
SPASRLQCI

SEQ ID NO: 1746 - protein, 10 aa, Homo sapiens
SPPKAPLLAA

SEQ ID NO: 1747 - protein, 10 aa, Homo sapiens
SPSLPASNKL

SEQ ID NO: 1748 - protein, 9 aa, Homo sapiens
YTTSMAMPI

SEQ ID NO: 1749 - protein, 10 aa, Homo sapiens
YTTSMAMPIL

SEQ ID NO: 1750 - protein, 9 aa, Homo sapiens
CLPGLTHPA

SEQ ID NO: 1751 - protein, 10 aa, Homo sapiens
GLTHPAHQPL

SEQ ID NO: 1752 - protein, 10 aa, Homo sapiens
HPAHQPLGSM

SEQ ID NO: 1753 - protein, 9 aa, Homo sapiens
LTHPAHQPL

SEQ ID NO: 1754 - protein, 10 aa, Homo sapiens
RPTSRARQSC

SEQ ID NO: 1755 - protein, 9 aa, Homo sapiens
RQSCCLPGL

SEQ ID NO: 1756 - protein, 10 aa, Homo sapiens
TSRARQSCCL

SEQ ID NO: 1757 - protein, 10 aa, Homo sapiens
ELLCVWVSSI

SEQ ID NO: 1758 - protein, 9 aa, Homo sapiens
EWKVKFPEL

SEQ ID NO: 1759 - protein, 9 aa, Homo sapiens
KFPELLCVW

SEQ ID NO: 1760 - protein, 9 aa, Homo sapiens
LLCVWVSSI

SEQ ID NO: 1761 - protein, 10 aa, Homo sapiens
LLTSSSREWK

SEQ ID NO: 1762 - protein, 9 aa, Homo sapiens
LTSSSREWK

SEQ ID NO: 1763 - protein, 10 aa, Homo sapiens
YPAYSKDSGL

SEQ ID NO: 1764 - protein, 9 aa, Homo sapiens
CLQCLWALL

SEQ ID NO: 1765 - protein, 10 aa, Homo sapiens
CQWGPCLQCL

SEQ ID NO: 1766 - protein, 9 aa, Homo sapiens
QWGPCLQCL

SEQ ID NO: 1767 - protein, 10 aa, Homo sapiens
QWGPCLQCLW

SEQ ID NO: 1768 - protein, 9 aa, Homo sapiens
AIQPVLWTT

SEQ ID NO: 1769 - protein, 9 aa, Homo sapiens
ALQPLQPHA

SEQ ID NO: 1770 - protein, 10 aa, Homo sapiens
DLHFCRSSIM

SEQ ID NO: 1771 - protein, 9 aa, Homo sapiens
EPHLALQPL

SEQ ID NO: 1772 - protein, 9 aa, Homo sapiens
ESKIMFATL

SEQ ID NO: 1773 - protein, 9 aa, Homo sapiens
FATLQRSSL

SEQ ID NO: 1774 - protein, 9 aa, Homo sapiens
FLKAESKIM

SEQ ID NO: 1775 - protein, 10 aa, Homo sapiens
FLKAESKIMF

SEQ ID NO: 1776 - protein, 9 aa, Homo sapiens
GPPARVPAV

SEQ ID NO: 1777 - protein, 10 aa, Homo sapiens
IMKPKRDGYM

SEQ ID NO: 1778 - protein, 9 aa, Homo sapiens
KIMFATLQR

SEQ ID NO: 1779 - protein, 9 aa, Homo sapiens
KPKRDGYMF

SEQ ID NO: 1780 - protein, 10 aa, Homo sapiens
KPKRDGYMFL

SEQ ID NO: 1781 - protein, 9 aa, Homo sapiens
LHFCRSSIM

SEQ ID NO: 1782 - protein, 9 aa, Homo sapiens
LQHGHRHGL

SEQ ID NO: 1783 - protein, 10 aa, Homo sapiens
MFATLQRSSL

SEQ ID NO: 1784 - protein, 9 aa, Homo sapiens
MFLKAESKI

SEQ ID NO: 1785 - protein, 9 aa, Homo sapiens
MLTGPPARV

SEQ ID NO: 1786 - protein, 10 aa, Homo sapiens
QPVLWTTPPL

SEQ ID NO: 1787 - protein, 10 aa, Homo sapiens
SMLTGPPARV

SEQ ID NO: 1788 - protein, 10 aa, Homo sapiens
TLQRSSLWCL

SEQ ID NO: 1789 - protein, 9 aa, Homo sapiens
VLPEPHLAL

SEQ ID NO: 1790 - protein, 10 aa, Homo sapiens
VPAVPFDLHF

SEQ ID NO: 1791 - protein, 9 aa, Homo sapiens
YMFLKAESK

SEQ ID NO: 1792 - protein, 10 aa, Homo sapiens
YMFLKAESKI

SEQ ID NO: 1793 - protein, 9 aa, Homo sapiens
APGPRGRTC

SEQ ID NO: 1794 - protein, 10 aa, Homo sapiens
CLRSHTCPPR

SEQ ID NO: 1795 - protein, 10 aa, Homo sapiens
CLWCHACLHR

SEQ ID NO: 1796 - protein, 9 aa, Homo sapiens
CPHLGSHPC

SEQ ID NO: 1797 - protein, 9 aa, Homo sapiens
CPLGLKSPL

SEQ ID NO: 1798 - protein, 9 aa, Homo sapiens
CPRSCRCPH

SEQ ID NO: 1799 - protein, 10 aa, Homo sapiens
CPRSCRCPHL

SEQ ID NO: 1800 - protein, 10 aa, Homo sapiens
CSLPLGNHPY

SEQ ID NO: 1801 - protein, 9 aa, Homo sapiens
GLRNRICPL

SEQ ID NO: 1802 - protein, 9 aa, Homo sapiens
GLRSHTYLR

SEQ ID NO: 1803 - protein, 10 aa, Homo sapiens
GLRSHTYLRR

SEQ ID NO: 1804 - protein, 10 aa, Homo sapiens
GPRGRTCHPG

SEQ ID NO: 1805 - protein, 9 aa, Homo sapiens
HLGSHPCRL

SEQ ID NO: 1806 - protein, 9 aa, Homo sapiens
HLRLHASPH

SEQ ID NO: 1807 - protein, 9 aa, Homo sapiens
HLRSCPCSL

SEQ ID NO: 1808 - protein, 9 aa, Homo sapiens
HLRTHLLPH

SEQ ID NO: 1809 - protein, 10 aa, Homo sapiens
HLRTHLLPHH

SEQ ID NO: 1810 - protein, 9 aa, Homo sapiens
HLRYRAYPP

SEQ ID NO: 1811 - protein, 10 aa, Homo sapiens
HLRYRAYPPC

SEQ ID NO: 1812 - protein, 9 aa, Homo sapiens
HPHHLRTHL

SEQ ID NO: 1813 - protein, 10 aa, Homo sapiens
HPHHLRTHLL

SEQ ID NO: 1814 - protein, 10 aa, Homo sapiens
HTYLRRLRSH

SEQ ID NO: 1815 - protein, 10 aa, Homo sapiens
LPCPHRLRSL

SEQ ID NO: 1816 - protein, 10 aa, Homo sapiens
LPHHRRTRSC

SEQ ID NO: 1817 - protein, 9 aa, Homo sapiens
LPLGNHPYL

SEQ ID NO: 1818 - protein, 9 aa, Homo sapiens
LPRPLHLRL

SEQ ID NO: 1819 - protein, 9 aa, Homo sapiens
NLRNHTCPP

SEQ ID NO: 1820 - protein, 10 aa, Homo sapiens
PPRLRSRTCL

SEQ ID NO: 1821 - protein, 9 aa, Homo sapiens
RLHASPHHL

SEQ ID NO: 1822 - protein, 10 aa, Homo sapiens
RLHASPHHLR

SEQ ID NO: 1823 - protein, 9 aa, Homo sapiens
RLRDHICPL

SEQ ID NO: 1824 - protein, 9 aa, Homo sapiens
RLRNLPCPH

SEQ ID NO: 1825 - protein, 10 aa, Homo sapiens
RLRNLPCPHR

SEQ ID NO: 1826 - protein, 9 aa, Homo sapiens
RLRSHTCPP

SEQ ID NO: 1827 - protein, 9 aa, Homo sapiens
RLRSLPRPL

SEQ ID NO: 1828 - protein, 10 aa, Homo sapiens
RLRSLPRPLH

SEQ ID NO: 1829 - protein, 9 aa, Homo sapiens
RLRSRTCLL

SEQ ID NO: 1830 - protein, 9 aa, Homo sapiens
RNRICPLSL

SEQ ID NO: 1831 - protein, 9 aa, Homo sapiens
RPLHLRLHA

SEQ ID NO: 1832 - protein, 10 aa, Homo sapiens
RPLHLRLHAS

SEQ ID NO: 1833 - protein, 10 aa, Homo sapiens
RSHACPPGLR

SEQ ID NO: 1834 - protein, 10 aa, Homo sapiens
RSHACPPNLR

SEQ ID NO: 1835 - protein, 10 aa, Homo sapiens
RSHAYALCLR

SEQ ID NO: 1836 - protein, 10 aa, Homo sapiens
RSHPCCHYLR

SEQ ID NO: 1837 - protein, 10 aa, Homo sapiens
RSHPCPLGLK

SEQ ID NO: 1838 - protein, 10 aa, Homo sapiens
RSHTCPPSLR

SEQ ID NO: 1839 - protein, 10 aa, Homo sapiens
RSLPRPLHLR

SEQ ID NO: 1840 - protein, 9 aa, Homo sapiens
RSRTCLLCL

SEQ ID NO: 1841 - protein, 10 aa, Homo sapiens
RSRTCLLCLR

SEQ ID NO: 1842 - protein, 9 aa, Homo sapiens
RSRTCPPGL

SEQ ID NO: 1843 - protein, 10 aa, Homo sapiens
RSRTCPPGLR

SEQ ID NO: 1844 - protein, 10 aa, Homo sapiens
RTHLLPHHRR

SEQ ID NO: 1845 - protein, 10 aa, Homo sapiens
RTRSCPCRWR

SEQ ID NO: 1846 - protein, 9 aa, Homo sapiens
RYRAYPPCL

SEQ ID NO: 1847 - protein, 10 aa, Homo sapiens
RYRAYPPCLW

SEQ ID NO: 1848 - protein, 9 aa, Homo sapiens
SLGNHLCPL

SEQ ID NO: 1849 - protein, 10 aa, Homo sapiens
SLPLGNHPYL

SEQ ID NO: 1850 - protein, 10 aa, Homo sapiens
SLPRPLHLRL

SEQ ID NO: 1851 - protein, 10 aa, Homo sapiens
SLRNCTCPPR

SEQ ID NO: 1852 - protein, 9 aa, Homo sapiens
SLRSHAYAL

SEQ ID NO: 1853 - protein, 9 aa, Homo sapiens
SLRSHPCPL

SEQ ID NO: 1854 - protein, 9 aa, Homo sapiens
SPHHLRTPP

SEQ ID NO: 1855 - protein, 10 aa, Homo sapiens
SPHHLRTPPH

SEQ ID NO: 1856 - protein, 10 aa, Homo sapiens
SPLRSQANAL

SEQ ID NO: 1857 - protein, 10 aa, Homo sapiens
YLRRLRSHTC

SEQ ID NO: 1858 - protein, 9 aa, Homo sapiens
YLRSRNSAP

SEQ ID NO: 1859 - protein, 10 aa, Homo sapiens
YLRSRNSAPG

SEQ ID NO: 1860 - protein, 9 aa, Homo sapiens
ALAPTLTHM

SEQ ID NO: 1861 - protein, 10 aa, Homo sapiens
ALAPTLTHML

SEQ ID NO: 1862 - protein, 10 aa, Homo sapiens
LLQVTQTSFA

SEQ ID NO: 1863 - protein, 10 aa, Homo sapiens
LQVTQTSFAL

SEQ ID NO: 1864 - protein, 9 aa, Homo sapiens
RLWHLLLQV

SEQ ID NO: 1865 - protein, 10 aa, Homo sapiens
RLWHLLLQVT

SEQ ID NO: 1866 - protein, 10 aa, Homo sapiens
CTQLARFFPI

SEQ ID NO: 1867 - protein, 9 aa, Homo sapiens
FFPITPPVW

SEQ ID NO: 1868 - protein, 10 aa, Homo sapiens
FPITPPVWHI

SEQ ID NO: 1869 - protein, 10 aa, Homo sapiens
GPRMQLCTQL

SEQ ID NO: 1870 - protein, 9 aa, Homo sapiens
ITPPVWHIL

SEQ ID NO: 1871 - protein, 9 aa, Homo sapiens
LALGPRMQL

SEQ ID NO: 1872 - protein, 10 aa, Homo sapiens
MQLCTQLARF

SEQ ID NO: 1873 - protein, 9 aa, Homo sapiens
RFFPITPPV

SEQ ID NO: 1874 - protein, 10 aa, Homo sapiens
RFFPITPPVW

SEQ ID NO: 1875 - protein, 9 aa, Homo sapiens
RMQLCTQLA

SEQ ID NO: 1876 - protein, 10 aa, Homo sapiens
RMQLCTQLAR

SEQ ID NO: 1877 - protein, 10 aa, Homo sapiens
SPPLALGPRM

SEQ ID NO: 1878 - protein, 9 aa, Homo sapiens
TQLARFFPI

SEQ ID NO: 1879 - protein, 9 aa, Homo sapiens
KSRQNHLQL

SEQ ID NO: 1880 - protein, 9 aa, Homo sapiens
ALKKLRSPL

SEQ ID NO: 1881 - protein, 10 aa, Homo sapiens
HLQLKSCRRK

SEQ ID NO: 1882 - protein, 9 aa, Homo sapiens
KISNWSLKK

SEQ ID NO: 1883 - protein, 10 aa, Homo sapiens
KISNWSLKKV

SEQ ID NO: 1884 - protein, 9 aa, Homo sapiens
KLRSPLWIF

SEQ ID NO: 1885 - protein, 10 aa, Homo sapiens
KSRQNHLQLK

SEQ ID NO: 1886 - protein, 10 aa, Homo sapiens
NWSLKKVPAL

SEQ ID NO: 1887 - protein, 9 aa, Homo sapiens
SLKKVPALK

SEQ ID NO: 1888 - protein, 10 aa, Homo sapiens
SLKKVPALKK

SEQ ID NO: 1889 - protein, 9 aa, Homo sapiens
SQKSRQNHL

SEQ ID NO: 1890 - protein, 9 aa, Homo sapiens
WSLKKVPAL

SEQ ID NO: 1891 - protein, 10 aa, Homo sapiens
WSLKKVPALK

SEQ ID NO: 1892 - protein, 9 aa, Homo sapiens
KLPECQRLL

SEQ ID NO: 1893 - protein, 10 aa, Homo sapiens
KPTRAATVSV

SEQ ID NO: 1894 - protein, 10 aa, Homo sapiens
LPPWPLHQQL

SEQ ID NO: 1895 - protein, 9 aa, Homo sapiens
LPRKPTRAA

SEQ ID NO: 1896 - protein, 10 aa, Homo sapiens
LPRKPTRAAT

SEQ ID NO: 1897 - protein, 9 aa, Homo sapiens
QQLLHRRPL

SEQ ID NO: 1898 - protein, 9 aa, Homo sapiens
RLLPPWPLH

SEQ ID NO: 1899 - protein, 10 aa, Homo sapiens
APASAPWPST

SEQ ID NO: 1900 - protein, 9 aa, Homo sapiens
APWPSTSSH

SEQ ID NO: 1901 - protein, 9 aa, Homo sapiens
RPAPASAPW

SEQ ID NO: 1902 - protein, 9 aa, Homo sapiens
WPSTSSHST

SEQ ID NO: 1903 - protein, 9 aa, Homo sapiens
RVQNQGHLL

SEQ ID NO: 1904 - protein, 10 aa, Homo sapiens
FLPISHCQCI

SEQ ID NO: 1905 - protein, 9 aa, Homo sapiens
FWLTKLNYL

SEQ ID NO: 1906 - protein, 9 aa, Homo sapiens
HLSMLTDSL

SEQ ID NO: 1907 - protein, 9 aa, Homo sapiens
HTMGFWLTK

SEQ ID NO: 1908 - protein, 10 aa, Homo sapiens
HTMGFWLTKL

SEQ ID NO: 1909 - protein, 10 aa, Homo sapiens
KLNYLCHLSM

SEQ ID NO: 1910 - protein, 9 aa, Homo sapiens
LPISHCQCI

SEQ ID NO: 1911 - protein, 10 aa, Homo sapiens
LPISHCQCIL

SEQ ID NO: 1912 - protein, 9 aa, Homo sapiens
LTDSLFLPI

SEQ ID NO: 1913 - protein, 10 aa, Homo sapiens
LTKLNYLCHL

SEQ ID NO: 1914 - protein, 10 aa, Homo sapiens
MLTDSLFLPI

SEQ ID NO: 1915 - protein, 10 aa, Homo sapiens
MQGHTMGFWL

SEQ ID NO: 1916 - protein, 9 aa, Homo sapiens
NYLCHLSML

SEQ ID NO: 1917 - protein, 9 aa, Homo sapiens
SMLTDSLFL

SEQ ID NO: 1918 - protein, 9 aa, Homo sapiens
TMGFWLTKL

SEQ ID NO: 1919 - protein, 9 aa, Homo sapiens
YLCHLSMLT

SEQ ID NO: 1920 - protein, 10 aa, Homo sapiens
ILDEAYVMAY

SEQ ID NO: 1921 - protein, 9 aa, Homo sapiens
VMAYVMAGV

SEQ ID NO: 1922 - protein, 9 aa, Homo sapiens
YVMAYVMAG

SEQ ID NO: 1923 - protein, 10 aa, Homo sapiens
YVMAYVMAGV

SEQ ID NO: 1924 - protein, 23 aa, Artificial Sequence
  Description of Artificial Sequence: Synthetic peptide
IFIITEYMANGSLLNYLREMRHR

SEQ ID NO: 1925 - protein, 8 aa, Homo sapiens
ANGSLLNY

SEQ ID NO: 1926 - protein, 9 aa, Homo sapiens
ANGSLLNYL

SEQ ID NO: 1927 - protein, 10 aa, Homo sapiens
ANGSLLNYLR

SEQ ID NO: 1928 - protein, 8 aa, Homo sapiens
EYMANGSL

SEQ ID NO: 1929 - protein, 10 aa, Homo sapiens
EYMANGSLLN

SEQ ID NO: 1930 - protein, 11 aa, Homo sapiens
EYMANGSLLNY

SEQ ID NO: 1931 - protein, 8 aa, Homo sapiens
GSLLNYLR

SEQ ID NO: 1932 - protein, 10 aa, Homo sapiens
GSLLNYLREM

SEQ ID NO: 1933 - protein, 9 aa, Homo sapiens
ITEYMANGS

SEQ ID NO: 1934 - protein, 10 aa, Homo sapiens
ITEYMANGSL

SEQ ID NO: 1935 - protein, 11 aa, Homo sapiens
ITEYMANGSLL

SEQ ID NO: 1936 - protein, 10 aa, Homo sapiens
MANGSLLNYL

SEQ ID NO: 1937 - protein, 11 aa, Homo sapiens
MANGSLLNYLR

SEQ ID NO: 1938 - protein, 8 aa, Homo sapiens
NGSLLNYL

SEQ ID NO: 1939 - protein, 8 aa, Homo sapiens
NGSLLNYL

SEQ ID NO: 1940 - protein, 10 aa, Homo sapiens
SLLNYLREMR

SEQ ID NO: 1941 - protein, 10 aa, Homo sapiens
TEYMANGSLL

SEQ ID NO: 1942 - protein, 12 aa, Homo sapiens
TEYMANGSLLNY

SEQ ID NO: 1943 - protein, 8 aa, Homo sapiens
YMANGSLL

SEQ ID NO: 1944 - protein, 9 aa, Homo sapiens
YMANGSLLN

SEQ ID NO: 1945 - protein, 8 aa, Homo sapiens
ANGSLLNY

SEQ ID NO: 1946 - protein, 9 aa, Homo sapiens
ANGSLLNYL

SEQ ID NO: 1947 - protein, 10 aa, Homo sapiens
ANGSLLNYLR

SEQ ID NO: 1948 - protein, 8 aa, Homo sapiens
EYMANGSL

SEQ ID NO: 1949 - protein, 9 aa, Homo sapiens
EYMANGSLL

SEQ ID NO: 1950 - protein, 10 aa, Homo sapiens
EYMANGSLLN

SEQ ID NO: 1951 - protein, 11 aa, Homo sapiens
EYMANGSLLNY

SEQ ID NO: 1952 - protein, 8 aa, Homo sapiens
GSLLNYLR

SEQ ID NO: 1953 - protein, 10 aa, Homo sapiens
GSLLNYLREM

SEQ ID NO: 1954 - protein, 9 aa, Homo sapiens
ITEYMANGS

SEQ ID NO: 1955 - protein, 10 aa, Homo sapiens
ITEYMANGSL

SEQ ID NO: 1956 - protein, 11 aa, Homo sapiens
ITEYMANGSLL

SEQ ID NO: 1957 - protein, 9 aa, Homo sapiens
MANGSLLNY

SEQ ID NO: 1958 - protein, 10 aa, Homo sapiens
MANGSLLNYL

SEQ ID NO: 1959 - protein, 11 aa, Homo sapiens
MANGSLLNYLR

SEQ ID NO: 1960 - protein, 8 aa, Homo sapiens
NGSLLNYL

SEQ ID NO: 1961 - protein, 9 aa, Homo sapiens
NGSLLNYLR

SEQ ID NO: 1962 - protein, 9 aa, Homo sapiens
SLLNYLREM

SEQ ID NO: 1963 - protein, 10 aa, Homo sapiens
SLLNYLREMR

SEQ ID NO: 1964 - protein, 9 aa, Homo sapiens
TEYMANGSL

SEQ ID NO: 1965 - protein, 10 aa, Homo sapiens
TEYMANGSLL

SEQ ID NO: 1966 - protein, 12 aa, Homo sapiens
TEYMANGSLLNY

SEQ ID NO: 1967 - protein, 8 aa, Homo sapiens
YMANGSLL

SEQ ID NO: 1968 - protein, 9 aa, Homo sapiens
YMANGSLLN

SEQ ID NO: 1969 - protein, 10 aa, Homo sapiens
YMANGSLLNY

SEQ ID NO: 1970 - protein, 101 aa, Homo sapiens
VADGLITTLHYPAPKRNKPTVYGVSPNYDKWEMERTDITMKHKLGGGQYGKVYEGVWKKYSLTVAVKTLKEDTMEVEEFLKEAAVMKEIKHPNLVQLLGVC

SEQ ID NO: 1971 - protein, 101 aa, Homo sapiens
VADGLITTLHYPAPKRNKPTVYGVSPNYDKWEMERTDITMKHKLGGGQYGVVYEGVWKKYSLTVAVKTLKEDTMEVEEFLKEAAVMKEIKHPNLVQLLGVC

SEQ ID NO: 1972 - protein, 101 aa, Homo sapiens
LLGVCTREPPFYIITEFMTYGNLLDYLRECNRQEVNAVVLLYMATQISSATEYLEKKNFIHRDLAARNCLVGENHLVKVADFGLSRLMTGDTYTAHAGAKF

SEQ ID NO: 1973 - protein, 101 aa, Homo sapiens
SLTVAVKTLKEDTMEVEEFLKEAAVMKEIKHPNLVQLLGVCTREPPFYIIIEFMTYGNLLDYLRECNRQEVNAVVLLYMATQISSAMEYLEKKNFIHRDLA

SEQ ID NO: 1974 - protein, 101 aa, Homo sapiens
STVADGLITTLHYPAPKRNKPTVYGVSPNYDKWEMERTDITMKHKLGGGQHGEVYEGVWKKYSLTVAVKTLKEDTMEVEEFLKEAAVMKEIKHPNLVQLLG

SEQ ID NO: 1975 - protein, 101 aa, Homo sapiens
SSLAMLDLLHVARDIACGCQYLEENHFIHRDIAARNCLLTCPGPGRVAKIADFGMARDIYRASYYRKGGCAMLPVKWMPPEAFMEGIFTSKTDTWSFGVLL

SEQ ID NO: 1976 - protein, 101 aa, Homo sapiens
QVAVKTLPEVCSEQDELDFLMEALIISKFNHQNIVRCIGVSLQSLPRFILMELMAGGDLKSFLRETRPRPSQPSSLAMLDLLHVARDIACGCQYLEENHFI

SEQ ID NO: 1977 - protein, 101 aa, Homo sapiens
MIKLIDIARQTAQGMDYLHAKSIIHRDLKSNNIFLHEDLTVKIGDFGLATEKSRWSGSHQFEQLSGSILWMAPEVIRMQDKNPYSFQSDVYAFGIVLYELM

SEQ ID NO: 1978 - protein, 101 aa, Homo sapiens
MIKEGSMSEDEFIEEAKVMMNLSHEKLVQLYGVCTKQRPIFIITEYMANGSLLNYLREMRHRFQTQQLLEMCKDVCEAMEYLESKQFLHRDLAARNCLVND

SEQ ID NO: 1979 - protein, 93 aa, Homo sapiens
MGFGDLKSPAGLQVLNDYLADKSYIEGYVPSQADVAVFEAVSGPPPADLCHALRWYNHIKSYEKEKASLPGVKKALGKYGPADVEDTTGSGAT

SEQ ID NO: 1980 - protein, 101 aa, Homo sapiens
ERCEVVMGNLEIVLTGHNADLSFLQWIREVTGYVLVAMNEFSTLPLPNLRMVRGTQVYDGKFAIFVMLNYNTNSSHALRQLRLTQLTEILSGGVYIEKNDK

SEQ ID NO: 1981 - protein, 101 aa, Homo sapiens
HLMAKAGLTLQQQHQRLAQLLLILSHIRHMSNKGMEHLYSMKCKNVVPLYGLLLEMLDAHRLHAPTSRGGASVEETDQSHLATAGSTSSHSLQKYYITGEA

SEQ ID NO: 1982 - protein, 101 aa, Homo sapiens
NQGKCVEGMVEIFDMLLATSSRFRMMNLQGEEFVCLKSIILLNSGVYTFLPSTLKSLEEKDHIHRVLDKITDTLIHLMAKAGLTLQQQHQRLAQLLLILSH

SEQ ID NO: 1983 - protein, 101 aa, Homo sapiens
IHLMAKAGLTLQQQHQRLAQLLLILSHIRHMSNKGMEHLYSMKCKNVVPLCDLLLEMLDAHRLHAPTSRGGASVEETDQSHLATAGSTSSHSLQKYYITGE

SEQ ID NO: 1984 - protein, 101 aa, Homo sapiens
IHLMAKAGLTLQQQHQRLAQLLLILSHIRHMSNKGMEHLYSMKCKNVVPLNDLLLEMLDAHRLHAPTSRGGASVEETDQSHLATAGSTSSHSLQKYYITGE

SEQ ID NO: 1985 - protein, 101 aa, Homo sapiens
IHLMAKAGLTLQQQHQRLAQLLLILSHIRHMSNKGMEHLYSMKCKNVVPLSDLLLEMLDAHRLHAPTSRGGASVEETDQSHLATAGSTSSHSLQKYYITGE

SEQ ID NO: 1986 - protein, 101 aa, Homo sapiens; identical to SEQ ID NO: 1592

SEQ ID NO: 1987 - protein, 101 aa, Homo sapiens; identical to SEQ ID NO: 1594

SEQ ID NO: 1988 - protein, 101 aa, Homo sapiens
GSGAFGTVYKGIWIPDGENVKIPVAIKVLRENTSPKANKEILDEAYVMAGLGSPYVSRLLGICLTSTVQLVTQLMPYGCLLDHVRENRGRLGSQDLLNWCM

SEQ ID NO: 1989 - protein, 101 aa, Homo sapiens
RVEEFKLKQMWKSPNGTIRNILGGTVFREAIICKNIPRLVSGWVKPIIIGHHAYGDQYRATDFVVPGPGKVEITYTPSDGTQKVTYLVHNFEEGGGVAMGM

SEQ ID NO: 1990 - protein, 101 aa, Homo sapiens
RVEEFKLKQMWKSPNGTIRNILGGTVFREAIICKNIPRLVSGWVKPIIIGCHAYGDQYRATDFVVPGPGKVEITYTPSDGTQKVTYLVHNFEEGGGVAMGM

SEQ ID NO: 1991 - protein, 101 aa, Homo sapiens; identical to SEQ ID NO: 1596

SEQ ID NO: 1992 - protein, 101 aa, Homo sapiens
RVEEFKLKQMWKSPNGTIRNILGGTVFREAIICKNIPRLVSGWVKPIIIGSHAYGDQYRATDFVVPGPGKVEITYTPSDGTQKVTYLVHNFEEGGGVAMGM

SEQ ID NO: 1993 - protein, 101 aa, Homo sapiens
VAVKMLKPSAHLTEREALMSELKVLSYLGNHMNIVNLLGACTIGGPTLVIIEYCCYGDLLNFLRRKRDSFICSKQEDHAEAALYKNLLHSKESSCSDSTNE

SEQ ID NO: 1994 - protein, 101 aa, Homo sapiens
VEATAYGLIKSDAAMTVAVKMLKPSAHLTEREALMSELKVLSYLGNHMNIANLLGACTIGGPTLVITEYCCYGDLLNFLRRKRDSFICSKQEDHAEAALYK

SEQ ID NO: 1995 - protein, 101 aa, Homo sapiens
ISELGAGNGGVVFKVSHKPSGLVMARKLIHLEIKPAIRNQIIRELQVLHESNSPYIVGFYGAFYSDGEISICMEHMDGGSLDQVLKKAGRIPEQILGKVSI

SEQ ID NO: 1996 - protein, 101 aa, Homo sapiens
LGAGNGGVVFKVSHKPSGLVMARKLIHLEIKPAIRNQIIRELQVLHECNSLYIVGFYGAFYSDGEISICMEHMDGGSLDQVLKKAGRIPEQILGKVSIAVI

SEQ ID NO: 1997 - protein, 89 aa, Homo sapiens
MPLNVSFTNRNYDLDYDSVQPYFYCDEEENFYQQQQQSDLQPPAPSEDIWKKFELLPTPPLSPSRRSGLCSPSYVAVTPFSLRGDNDGG

SEQ ID NO: 1998 - protein, 101 aa, Homo sapiens
FTNRNYDLDYDSVQPYFYCDEEENFYQQQQQSELQPPAPSEDIWKKFELLSTPPLSPSRRSGLCSPSYVAVTPFSLRGDNDGGGGSFSTADQLEMVTELLG

SEQ ID NO: 1999 - protein, 101 aa, Homo sapiens
TNRNYDLDYDSVQPYFYCDEEENFYQQQQQSELQPPAPSEDIWKKFELLPIPPLSPSRRSGLCSPSYVAVTPFSLRGDNDGGGGSFSTADQLEMVTELLGG

SEQ ID NO: 2000 - protein, 101 aa, Homo sapiens
VAVKMLKPTARSSEKQALMSELKIMTHLGPHLNIVNLLGACTKSGPIYIIIEYCFYGDLVNYLHKNRDSFLSHHPEKPKKELDIFGLNPADESTRSYVILS

SEQ ID NO: 2001 - protein, 101 aa, Homo sapiens; identical to SEQ ID NO: 1604

SEQ ID NO: 2002 - protein, 101 aa, Homo sapiens
HANWSVSREAGFSYSHAGLSNRLARDNELRENDKEQLKAISTRDPLSEITKQEKDFLWSHRHYCVTIPEILPKLLLSVKWNSRDEVAQMYCLVKDWPPIKP

SEQ ID NO: 2003 - protein, 72 aa, Homo sapiens
LFINLFSMMLGSGMPELQSFDDIAYIRKTLALDKTEQEALEYFMKQMNDARHGGWTTKMDWIFHTIKQHALN

SEQ ID NO: 2004 - protein, 101 aa, Homo sapiens
QRGGVITDEEETSKKIADQLDNIVDMREYDVPYHIRLSIDIETTKLPLKFRDAETDQIMMISYMIDGQGYLITNREIVSEDIEDFEFTPKPEYEGPFCVFN

SEQ ID NO: 2005 - protein, 101 aa, Homo sapiens; identical to SEQ ID NO: 1605

SEQ ID NO: 2006 - protein, 79 aa, Homo sapiens; identical to SEQ ID NO: 1606

SEQ ID NO: 2007 - protein, 101 aa, Homo sapiens; identical to SEQ ID NO: 1610

SEQ ID NO: 2008 - protein, 101 aa, Homo sapiens
TYSPALNKMFCQLAKTCPVQLWVDSTPPPGTRVRAMAIYKQSQHMTEVVRHCPHHERCSDSDGLAPPQHLIRVEGNLRVEYLDDRNTFRHSVVVPYEPPEV

SEQ ID NO: 2009 - protein, 101 aa, Homo sapiens; identical to SEQ ID NO: 1611

SEQ ID NO: 2010 - protein, 101 aa, Homo sapiens; identical to SEQ ID NO: 1612

SEQ ID NO: 2011 - protein, 101 aa, Homo sapiens; identical to SEQ ID NO: 1613

SEQ ID NO: 2012 - protein, 53 aa, Homo sapiens
GVEPCYGDKDKRRHCFATWKNISGSIEIVKQGCWLDDINCYDRTDCVEKKRQP

SEQ ID NO: 2013 - protein, 103 aa, Homo sapiens
GVEPCYGDKDKRRHCFATWKNISGSIEIVKQGCWLDDINCYDRTDCVEKKTALKYIFVAVRAICVMKSFLIFRRWKSHSPLQIQLHLSHPITTSCSIPWCHLC

SEQ ID NO: 2014 - protein, 118 aa, Homo sapiens
TAEAVNVAIAAPPSEGEANAELCRYLSKVLELRKSDVVLDKVGLALFFFFFETKSCSVAQAGVQWRSLGSLQPPPPGFKLFSCLSFLSSWDYRRMPPCLANFCIFNRDGVSPCWSGWS

SEQ ID NO: 2015 - protein, 71 aa, Homo sapiens
LSVIIFFFVYIWHWALPLILNNHHICLMSSIILDCNSVRQSIMSVCFFFFSVIFSTRCLTDSRYPNICWFK

SEQ ID NO: 2016 - protein, 60 aa, Homo sapiens
LSVIIFFFVYIWHWALPLILNNHHICLMSSIILDCNSVRQSIMSVCFFFFCYILNTMFDR

SEQ ID NO: 2017 - protein, 106 aa, Homo sapiens
VLVLSCDLITDVALHEVVDLFRAYDASLAMLMRKGQDSIEPVPGQKGKKKQWSSVTSLEWTAQERGCSSWLMKQTWMKSWSLRDPSYRSILEYVSTRVLWMPTSTV

SEQ ID NO: 2018 - protein, 112 aa, Homo sapiens
SIQVMRAQMNQIQSVEGQPLARRPRATGRTKRCQPRDVTKKTCNSNDGKKREWEKRKQILGGGGKYKEYFLKRILIRKAMTVLAGDKKGLGRFMRCVQSETKAVSLQLPLGR

SEQ ID NO: 2019 - protein, 57 aa, Homo sapiens
LDFLGEFATDIRTHGVHMVLNHQGRPSGDAFIQMKSADRAFMAAQKCHKKKHEGQIC

SEQ ID NO: 2020 - protein, 51 aa, Homo sapiens
LDFLGEFATDIRTHGVHMVLNHQGRPSGDAFIQMKSADRAFMAAQKCHKKT

SEQ ID NO: 2021 - protein, 75 aa, Homo sapiens
GALCKDGRFRSDIGEFEWKLKEGHKKIYGKQSMVDEVSGKVLEMDISKKKHYNRKISIKKLNRMKVPLMKLITRV

SEQ ID NO: 2022 - protein, 58 aa, Homo sapiens
RERAQLLEEQEKTLTSKLQEQARVLKERCQGESTQLQNEIQKLQKTLKKKPRDICRIS

SEQ ID NO: 2023 - protein, 53 aa, Homo sapiens
VNTLKEGKRLPCPPNCPDEVYQLMRKCWEFQPSNRTSFQNLIEGFEALLKTSN

SEQ ID NO: 2024 - protein, 65 aa, Homo sapiens
CRPVTPSCKELADLMTRCMNYDPNQRPFFRAIMRDINKLEEQNPDIVSEKNQQLKWTPHILKSAS

SEQ ID NO: 2025 - protein, 69 aa, Homo sapiens
DDHDVLSFLTFQLTEPGKEPPTPDKEISEKEKEKYQEEFEHFQQELDKKKRGIPEGPPRPPRAACGGNI

SEQ ID NO: 2026 - protein, 71 aa, Homo sapiens
DDHDVLSFLTFQLTEPGKEPPTPDKEISEKEKEKYQEEFEHFQQELDKKKRNSRRATPTSKGSLRRKYLRV

SEQ ID NO: 2027 - protein, 68 aa, Homo sapiens
TKSTLIGEDVNPLIKLDDAVNVDEIMTDTSTSYLLCISENKENVRDKKKGQHFYWHCGSAACHRRGCV

SEQ ID NO: 2028 - protein, 81 aa, Homo sapiens
LYTKSTLIGEDVNPLIKLDDAVNVDEIMTDTSTSYLLCISENKENVRDKKRATFLLALWECSLPQARLCLIVSRTLLLVQS

SEQ ID NO: 2029 - protein, 58 aa, Homo sapiens
LPPPKLTDPRLLYIGFLGYCSGLIDNLIRRRPIATAGLHRQLLYITAFFFCWILSCKT

SEQ ID NO: 2030 - protein, 56 aa, Homo sapiens
SLPPPKLTDPRLLYIGFLGYCSGLIDNLIRRRPIATAGLHRQLLYITAFFLLDIIL

SEQ ID NO: 2031 - protein, 112 aa, Homo sapiens
NQSGGAGEDCQIFSTPGHPKMIYSSSNLKTPSKLCSGSKSHDVQEVLKKKTGSNEVTTRYEEKKTGSVRKANRMPKDVNIQVRKKQKHETRRKSKYNEDFERAWREDLTIKR

SEQ ID NO: 2032 - protein, 23 aa, Homo sapiens
MAPVKKLVVKGGKKKEASSEVHS

SEQ ID NO: 2033 - protein, 18 aa, Homo sapiens
MAPVKKLVVKGGKKRSKF

SEQ ID NO: 2034 - protein, 51 aa, Homo sapiens
MPSHQGAEQQQQQHHVFISQVVTEKEFLSRSDQLQQAVQSQGFINYCQKKN

SEQ ID NO: 2035 - protein, 65 aa, Homo sapiens
MPSHQGAEQQQQQHHVFISQVVTEKEFLSRSDQLQQAVQSQGFINYCQKKLMLLRLNLRKMCGPF

SEQ ID NO: 2036 - protein, 79 aa, Homo sapiens
AEVFEKEQSICAAEEQPAEDGQGETNKNRTKGGWQQKSKGPKKTAKSKKKETFKKKTYTCAITTVKATETKAGKWSRWE

SEQ ID NO: 2037 - protein, 53 aa, Homo sapiens
MAEVFEKEQSICAAEEQPAEDGQGETNKNRTKGGWQQKSKGPKKTAKSKKRNL

SEQ ID NO: 2038 - protein, 71 aa, Homo sapiens
NIMEIRQLPSSHALEAKLSRMSYPVKEQESILKTVGKLTATQVAKISFFFALCGFWQICHIKKHFQTHKLL

SEQ ID NO: 2039 - protein, 68 aa, Homo sapiens
YEKKKYYDKNAIAITNISSSDAPLQPLVSSPSLQAAVDKNKLEKEKEKKKGREKERKGARKAGKTTYS

SEQ ID NO: 2040 - protein, 97 aa, Homo sapiens; identical to SEQ ID NO: 1626

SEQ ID NO: 2041 - protein, 65 aa, Homo sapiens
IYQDAYRAEWQVYKEEISRFKEQLTPSQIMSLEKEIMDKHLKRKAMTKKKRVNTAWKTKKTSFSL

SEQ ID NO: 2042 - protein, 51 aa, Homo sapiens
IYQDAYRAEWQVYKEEISRFKEQLTPSQIMSLEKEIMDKHLKRKAMTKKKS

SEQ ID NO: 2043 - protein, 52 aa, Homo sapiens
KPQEVCVAVWRKNDENITLETVCHDPKLPYHDFILEDAASPKCIMKEKKKAW

SEQ ID NO: 2044 - protein, 84 aa, Homo sapiens
EKPQEVCVAVWRKNDENITLETVCHDPKLPYHDFILEDAASPKCIMKEKKSLVRLSSCVPVALMSAMTTSSSQKNITPAILTCC

SEQ ID NO: 2045 - protein, 74 aa, Homo sapiens
VPSKYQFLCSDHFTPDSLDIRWGIRYLKQTAVPTIFSLPEDNQGKDPSKKNPRRKTWKMRKKYAQKPSQKNHLY

SEQ ID NO: 2046 - protein, 88 aa, Homo sapiens
GTTEEMKYVLGQLVGLNSPNSILKAAKTLYEHYSGGESHNSSSSKTFEKKGEKNDLQLFVMSDTTYKIYWTVILLNPCGNLHLKTTSL

SEQ ID NO: 2047 - protein, 55 aa, Homo sapiens
QQLIRETLISWLQAQMLNPQPEKTFIRNKAAQVFALLFVTEYLTKWPKFFLTFSQ

SEQ ID NO: 2048 - protein, 93 aa, Homo sapiens; identical to SEQ ID NO: 1617

SEQ ID NO: 2049 - protein, 53 aa, Homo sapiens
APVIFQIALDKPCHQAEVKHLHHLLKQLKPSEKYLKIKHLLLKRERVDLSKLQ

SEQ ID NO: 2050 - protein, 33 aa, Homo sapiens
MLQFRGSRFFQMLILYYILPRKVLQMDFLVHPA

SEQ ID NO: 2051 - protein, 179 aa, Homo sapiens; identical to SEQ ID NO: 1618

SEQ ID NO: 2052 - protein, 79 aa, Homo sapiens
AHQGFPAAKESRVIQLSLLSLLIPPLTCLASEALPRPLLALPPVLLSLAQDHSRLLQCQATRCHLGHPVASRTASCILP

SEQ ID NO: 2053 - protein, 222 aa, Homo sapiens
PILAATGTSVRTAARTWVPRAAIRVPDPAAVPDDHAGPGAECHGRPLLYTADSSLWTTRPQRVWSTGPDSILQPAKSSPSAAAATLLPATTVPDPSCPTFVSAAATVSTTTAPVLSASILPAAIPASTSAVPGSIPLPAVDDTAAPPEPAPLLTATGSVSLPAAATSAASTLDALPAGCVSSAPVSAVPANCLFPAALPSTAGAISRFIWVSGILSPLNDLQ

SEQ ID NO: 2054 - protein, 185 aa, Homo sapiens
PCRAGRRVPWAASLIHSRFLLMDNKAPAGMVNRARLHITTSKVLTLSSSSHPTPSNHRPRPLMPNLRISSSHSLNHHSSSPLSLHTPSSHPSLHISSPRLHTPPSSRRHSSTPRASPPTHSHRLSLLTSSSNLSSQHPRRSPSRLRILSPSLSSPSKLPIPSSASLHRRSYLKIHLGLRHPQPPQ

SEQ ID NO: 2055 - protein, 58 aa, Homo sapiens
RTNPTVRMRPHCVPFWTGRILLPSAASVCPIPFEACHLCQAMTLRCPNTQGCCSSWAS

SEQ ID NO: 2056 - protein, 90 aa, Homo sapiens
TNQALPKIEVICRGTPRCPSTVPPSPAQPYLRVSLPEDRYTQAWAPTSRTPWGAMVPRGVSMAHKVATPGSQTIMPCPMPTTPVQAWLEA

SEQ ID NO: 2057 - protein, 41 aa, Homo sapiens
RMERELKKWSIQTCLSARTGLSISCTTLNSPPLKKMSMPAV

SEQ ID NO: 2058 - protein, 35 aa, Homo sapiens
LCSRYSLFLAWRLSSVLQRFRFTHVIQQRMESQIS

SEQ ID NO: 2059 - protein, 39 aa, Homo sapiens
RSACVTVKGPLASVGRHSLSKQDCKFLPFWGFLEEFLLC

SEQ ID NO: 2060 - protein, 97 aa, Homo sapiens
IQWGTTTAPRPIRPPFLESKQNCSHFPTPLLASEDRRETGLFLPSAAQKMKKAHFLKTWFRSNPTKTKKARFSTASLAKELTHPLLVSLLLKEKQDG

SEQ ID NO: 2061 - protein, 73 aa, Homo sapiens
PTDPFLGLRLGLHLQKVFHQSHAEYSGAPPPPPAPSGLRFWNPSRIAHISQLLSWPQKTEERLGYSSHQLPRK

SEQ ID NO: 2062 - protein, 45 aa, Homo sapiens
FCCSCCFFGGERWSKSPYCPQRMTPGTTFITMMKKEAEKRTRTLT

SEQ ID NO: 2063 - protein, 95 aa, Homo sapiens
WRRNCKAPVSLRKSVQTPARSSPARPDRTRRLPSLGVPGQPWALGAAASRRCCCCCRSPLGSARSRSPATLALTPRATRSRCPGATWREAASWAE

SEQ ID NO: 2064 - protein, 113 aa, Homo sapiens; identical to SEQ ID NO: 2

SEQ ID NO: 2065 - protein, 57 aa, Homo sapiens
PRPRRCTRHPACPLDHTTPPAWSPPWVRALLDAHRAPSESPCSPFRLAFLQEQYHEA

SEQ ID NO: 2066 - protein, 494 aa, Homo sapiens; identical to SEQ ID NO: 1623

SEQ ID NO: 2067 - protein, 53 aa, Homo sapiens
SWKGTNWCNDMCIFITSGQIFKGTRGPRFLWGSKDQRQKGSNYSQSEALCVLL

SEQ ID NO: 2068 - protein, 9 aa, Homo sapiens
KRTKCFTFG

SEQ ID NO: 2069 - protein, 27 aa, Homo sapiens
PIFIQTLLLWDFLQKDLKAYTGTILMM

SEQ ID NO: 2070 - protein, 22 aa, Homo sapiens
QKMILTKQIKTKPTDTFLQILR

SEQ ID NO: 2071 - protein, 43 aa, Homo sapiens
GFWIQSIKTITRYTIFVLKDIMTPPNLIAELHNILLKTITHHS

SEQ ID NO: 2072 - protein, 40 aa, Homo sapiens
NYSNVQWRNLQSSVCGLPAKGEDIFLQFRTHTTGRQVHVL

SEQ ID NO: 2073 - protein, 44 aa, Homo sapiens
YQSRVLPQTEQDAKKGQNVSLLGKYILHTRTRGNLRKSRKWKSM

SEQ ID NO: 2074 - protein, 85 aa, Homo sapiens
SSQNARGCSPRGPCTSSSYTGGPCTSPLLAPVIFCPFPENLPGQLRFPSGLLAFWDSQVCDLHVLPCPQQDVLPTGQDLPCAAVG

SEQ ID NO: 2075 - protein, 72 aa, Homo sapiens
GAAPTMSAAQIAMVWPLLSILSEWKEICVWSIWMTETLFDIVWWCPMSRLRLALTVPPSTTTTCVTVPAWAA

SEQ ID NO: 2076 - protein, 97 aa, Homo sapiens
TGGPSSPSSHWKTPVVIYWDGTALRCVFVPVLGETGAQRKRISARKGSLTTSCPQGALSEHCPTTPAPLPSQRRNHWMENISPFRSVGVSASRCSES

SEQ ID NO: 2077 - protein, 31 aa, Homo sapiens
FHTPARHPRPRHGHLQAVTAHDGGCEALPPP

SEQ ID NO: 2078 - protein, 78 aa, Homo sapiens; identical to SEQ ID NO: 1627

SEQ ID NO: 2079 - protein, 28 aa, Homo sapiens
VRKHFQTYGNYFLKTTFCPPCRPKQWMI

SEQ ID NO: 2080 - protein, 46 aa, Homo sapiens; identical to SEQ ID NO: 1628

SEQ ID NO: 2081 - protein, 81 aa, Homo sapiens
ELQETGHRQVALRRSGRPPKCAERPGAADTGAHCTSTDGRLKISVETYTVSSQLLMVLMSLDLDTGLVPSLVSKCLILRVK

SEQ ID NO: 2082 - protein, 10 aa, Homo sapiens
KSDASRLSGA

SEQ ID NO: 2083 - protein, 29 aa, Homo sapiens
RTAYFCQYHTASVYSERAMPPGCPEPSQA

SEQ ID NO: 2084 - protein, 91 aa, Homo sapiens; identical to SEQ ID NO: 1630

SEQ ID NO: 2085 - protein, 31 aa, Homo sapiens
SSLRITGDWTSSGRSTKIWKTTQMCRKTWSG

SEQ ID NO: 2086 - protein, 104 aa, Homo sapiens
RRRRGGVGRRGVRPGRVRPGGTGRRGGDGGRAAAARAALGELARALPGHLLQSQSARRAARMAQLRRRAAALPNAAAWHGPPHPQLPRSPLALQRCRDTRWASG

SEQ ID NO: 2087 - protein, 66 aa, Homo sapiens
SCKVFFKRAAEGKQKYLCASRNDCTIDKFRRKNCPSCRLRKCYEAGMTLGEKFRVGNCKHLKMTRP

SEQ ID NO: 2088 - protein, 49 aa, Homo sapiens
MAGAPPPASLPPCSLISDCCASNQRDSVGVGPSEPGNNIKICNESASRK

SEQ ID NO: 2089 - protein, 61 aa, Homo sapiens
HGWRPFLPVRARSRWNRRLDVTVANGRSWKYGWSLLRVPQVNGIQVLNVSLKSSSNVISYE

SEQ ID NO: 2090 - protein, 65 aa, Homo sapiens
RLKEVFQTKIQEFRKACYTLTGYQIDITTENQYRLTSLYAEHPGDCLIFKLRVPGSSVLVTVPGL

SEQ ID NO: 2091 - protein, 107 aa, Homo sapiens
AEVLKVIRQSAGQKTTCGQGLEGPWERPPPLDESERDGGSEDQVEDPALSALLLRPRPPRPEVGAHQDEQAAQGADPRLGAQPACRGLPGLLTVPQPEPLLAPPSAA

SEQ ID NO: 2092 - protein, 100 aa, Homo sapiens
ERAEWRENIREQQKKCFRSFSLTSVELQMLTNSCVKLQTVHSIPLTINKEEALQRPVASDFEPQGLSEAARWNSKENLLAGPSENDPNLFVALYDFVASG

SEQ ID NO: 2093 - protein, 101 aa, Homo sapiens
ELQMLTNSCVKLQTVHSIPLTINKEDDESPGLYGFLNVIVHSATGFKQSSKALQRPVASDFEPQGLSEAARWNSKENLLAGPSENDPNLFVALYDFVASGD

SEQ ID NO: 2094 - protein, 101 aa, Homo sapiens
ISNSWDAHLGLGACGEAEGLGVQGAEEEEEEEEEEEEEGAGVPACPPKGPELFPLIFPAEPAQASGPYVEIIEQPKQRGMRFRYKCEGRSAGSIPGERSTD

SEQ ID NO: 2095 - protein, 100 aa, Homo sapiens
LQRLDGMGCLEFDEERAQQEDALAQQAFEEARRRTREFEDRDRSHREEMEVHELEKSKRALETQMEEMKTQLEELEDELQATEDAKLRLEVNMQALKGQF

SEQ ID NO: 2096 - protein, 100 aa, Homo sapiens
KGSFPENLRHLKNTMETIDWKVFESWMHHWLLFEMSRHSLEQKPTDAPPKAGVPNKPGIPKLLEGSKNSIQWEKAEDNGCRITYYILEIRKSTSNNLQNQ

SEQ ID NO: 2097 - protein, 101 aa, Homo sapiens
SWENSDDSRNKLSKIPSTPKLIPKVTKTADKHKDVIINQAKMSTREKNSQVYRRKHQELQAMQMELQSPEYKLSKLRTSTIMTDYNPNYCFAGKTSSISDL

SEQ ID NO: 2098 - protein, 100 aa, Homo sapiens
EGHRMDKPANCTHDLYMIMRECWHAAPSQRPTFKQLVEDLDRVLTVTSTDVKATQEENRELRSRCEELHGKNLELGKIMDRFEEVVYQAMEEVQKQKELS

SEQ ID NO: 2099 - protein, 107 aa, Homo sapiens
RDNTLLLRRVELFSLSRQVARESTYLSSLKGSRLHPEELGGPPLKKLKQEATSKSQIMSLWGLVSKMPPEKVQRLYVDFPQHLRHLLGDWLESQPWEFLVGSDAFCC

SEQ ID NO: 2100 - protein, 83 aa, Homo sapiens
MSREMQDVDLAEVKPLVEKGETITGLLQEFDVQEALSVVSEDQSLFECAYGTPHLAKTEMTASSSSDYGQTSKMSPRVPQQDW

SEQ ID NO: 2101 - protein, 101 aa, Homo sapiens
VLDMHGFLRQALCRLRQEEPQSLQAAVRTDGFDEFKVRLQDLSSCITQGKAIETQSSSSEEIVPSPPSPPPLPRIYKPCFVCQDKSSGYHYGVSACEGCKG

SEQ ID NO: 2102 - protein, 101 aa, Homo sapiens
RSSPEQPRPSTSKAVSPPHLDGPPSPRSPVIGSEVFLPNSNHVASGAGEAAIETQSSSSEEIVPSPPSPPPLPRIYKPCFVCQDKSSGYHYGVSACEGCKG

SEQ ID NO: 2103 - protein, 101 aa, Homo sapiens
VARFNDLRFVGRSGRGKSFTLTITVFTNPPQVATYHRAIKITVDGPREPRNRTEKHSTMPDSPVDVKTQSRLTPPTMPPPPTTQGAPRTSSFTPTTLTNGT

SEQ ID NO: 2104 - protein, 55 aa, Homo sapiens
MALNSEALSVVSEDQSLFECAYGTPHLAKTEMTASSSSDYGQTSKMSPRVPQQDW

SEQ ID NO: 2105 - protein, 9 aa, Homo sapiens
GQYGKVYEG

SEQ ID NO: 2106 - protein, 10 aa, Homo sapiens
GQYGKVYEGV

SEQ ID NO: 2107 - protein, 9 aa, Homo sapiens
KLGGGQYGK

SEQ ID NO: 2108 - protein, 10 aa, Homo sapiens
KLGGGQYGKV

SEQ ID NO: 2109 - protein, 9 aa, Homo sapiens
KVYEGVWKK

SEQ ID NO: 2110 - protein, 10 aa, Homo sapiens
KVYEGVWKKY

SEQ ID NO: 2111 - protein, 9 aa, Homo sapiens
QYGKVYEGV

SEQ ID NO: 2112 - protein, 10 aa, Homo sapiens
QYGKVYEGVW

SEQ ID NO: 2113 - protein, 9 aa, Homo sapiens
GQYGVVYEG

SEQ ID NO: 2114 - protein, 10 aa, Homo sapiens
GQYGVVYEGV

SEQ ID NO: 2115 - protein, 9 aa, Homo sapiens
KLGGGQYGV

SEQ ID NO: 2116 - protein, 10 aa, Homo sapiens
KLGGGQYGVV

SEQ ID NO: 2117 - protein, 9 aa, Homo sapiens
QYGVVYEGV

SEQ ID NO: 2118 - protein, 10 aa, Homo sapiens
QYGVVYEGVW

SEQ ID NO: 2119 - protein, 9 aa, Homo sapiens
VVYEGVWKK

SEQ ID NO: 2120 - protein, 10 aa, Homo sapiens
VVYEGVWKKY

SEQ ID NO: 2121 - protein, 10 aa, Homo sapiens
ATQISSATEY

SEQ ID NO: 2122 - protein, 10 aa, Homo sapiens
ISSATEYLEK

SEQ ID NO: 2123 - protein, 9 aa, Homo sapiens
SSATEYLEK

SEQ ID NO: 2124 - protein, 10 aa, Homo sapiens
TQISSATEYL

SEQ ID NO: 2125 - protein, 10 aa, Homo sapiens
YMATQISSAT

SEQ ID NO: 2126 - protein, 10 aa, Homo sapiens
FYIIIEFMTY

SEQ ID NO: 2127 - protein, 10 aa, Homo sapiens
IIEFMTYGNL

SEQ ID NO: 2128 - protein, 9 aa, Homo sapiens
IIIEFMTYG

SEQ ID NO: 2129 - protein, 10 aa, Homo sapiens
IIIEFMTYGN

SEQ ID NO: 2130 - protein, 10 aa, Homo sapiens
YIIIEFMTYG

SEQ ID NO: 2131 - protein, 10 aa, Homo sapiens
GQHGEVYEGV

SEQ ID NO: 2132 - protein, 10 aa, Homo sapiens
KLGGGQHGEV

SEQ ID NO: 2133 - protein, 9 aa, Homo sapiens
KIADFGMAR

SEQ ID NO: 2134 - protein, 10 aa, Homo sapiens
RVAKIADFGM

SEQ ID NO: 2135 - protein, 10 aa, Homo sapiens
FILMELMAGG

SEQ ID NO: 2136 - protein, 9 aa, Homo sapiens
ILMELMAGG

SEQ ID NO: 2137 - protein, 10 aa, Homo sapiens
ILMELMAGGD

SEQ ID NO: 2138 - protein, 10 aa, Homo sapiens
LMELMAGGDL

SEQ ID NO: 2139 - protein, 9 aa, Homo sapiens
LPRFILMEL

SEQ ID NO: 2140 - protein, 10 aa, Homo sapiens
LPRFILMELM

SEQ ID NO: 2141 - protein, 10 aa, Homo sapiens
LQSLPRFILM

SEQ ID NO: 2142 - protein, 10 aa, Homo sapiens
SLPRFILMEL

SEQ ID NO: 2143 - protein, 9 aa, Homo sapiens
LATEKSRWS

SEQ ID NO: 2144 - protein, 10 aa, Homo sapiens
LATEKSRWSG

SEQ ID NO: 2145 - protein, 9 aa, Homo sapiens
EYMANGSLL

SEQ ID NO: 2146 - protein, 11 aa, Homo sapiens
GPPPADLCHAL

SEQ ID NO: 2147 - protein, 9 aa, Homo sapiens
GLLLEMLDA

SEQ ID NO: 2148 - protein, 9 aa, Homo sapiens
LYGLLLEML

SEQ ID NO: 2149 - protein, 9 aa, Homo sapiens
NVVPLYGLL

SEQ ID NO: 2150 - protein, 9 aa, Homo sapiens
PLYGLLLEM

SEQ ID NO: 2151 - protein, 10 aa, Homo sapiens
PLYGLLLEML

SEQ ID NO: 2152 - protein, 10 aa, Homo sapiens
VPLYGLLLEM

SEQ ID NO: 2153 - protein, 9 aa, Homo sapiens
VVPLYGLLL

SEQ ID NO: 2154 - protein, 9 aa, Homo sapiens
FLPSTLKSL

SEQ ID NO: 2155 - protein, 9 aa, Homo sapiens
GVYTFLPST

SEQ ID NO: 2156 - protein, 10 aa, Homo sapiens
GVYTFLPSTL

SEQ ID NO: 2157 - protein, 10 aa, Homo sapiens
TFLPSTLKSL

SEQ ID NO: 2158 - protein, 9 aa, Homo sapiens
VYTFLPSTL

SEQ ID NO: 2159 - protein, 9 aa, Homo sapiens
YTFLPSTLK

SEQ ID NO: 2160 - protein, 9 aa, Homo sapiens
NVVPLCDLL

SEQ ID NO: 2161 - protein, 10 aa, Homo sapiens
NVVPLCDLLL

SEQ ID NO: 2162 - protein, 9 aa, Homo sapiens
PLCDLLLEM

SEQ ID NO: 2163 - protein, 10 aa, Homo sapiens
PLCDLLLEML

SEQ ID NO: 2164 - protein, 10 aa, Homo sapiens
VPLCDLLLEM

SEQ ID NO: 2165 - protein, 9 aa, Homo sapiens
VVPLCDLLL

SEQ ID NO: 2166 - protein, 9 aa, Homo sapiens
NVVPLNDLL

SEQ ID NO: 2167 - protein, 10 aa, Homo sapiens
NVVPLNDLLL

SEQ ID NO: 2168 - protein, 9 aa, Homo sapiens
PLNDLLLEM

SEQ ID NO: 2169 - protein, 10 aa, Homo sapiens
PLNDLLLEML

SEQ ID NO: 2170 - protein, 10 aa, Homo sapiens
VPLNDLLLEM

SEQ ID NO: 2171 - protein, 9 aa, Homo sapiens
NVVPLSDLL

SEQ ID NO: 2172 - protein, 10 aa, Homo sapiens
NVVPLSDLLL

SEQ ID NO: 2173 - protein, 9 aa, Homo sapiens
PLSDLLLEM

SEQ ID NO: 2174 - protein, 10 aa, Homo sapiens
PLSDLLLEML

SEQ ID NO: 2175 - protein, 10 aa, Homo sapiens
VPLSDLLLEM

SEQ ID NO: 2176 - protein, 9 aa, Homo sapiens
VVPLSDLLL

SEQ ID NO: 2177 - protein, 10 aa, Homo sapiens
VLERCPHRPI

SEQ ID NO: 2178 - protein, 9 aa, Homo sapiens
YTLDVLERC

SEQ ID NO: 2179 - protein, 9 aa, Homo sapiens
FQNGKMALS

SEQ ID NO: 2180 - protein, 10 aa, Homo sapiens
VMAGLGSPYV

SEQ ID NO: 2181 - protein, 9 aa, Homo sapiens
KPIIIGHHA

SEQ ID NO: 2182 - protein, 9 aa, Homo sapiens
KPIIIGCHA

SEQ ID NO: 2183 - protein, 9 aa, Homo sapiens
KPIIIGGHA

SEQ ID NO: 2184 - protein, 9 aa, Homo sapiens
KPIIIGSHA

SEQ ID NO: 2185 - protein, 10 aa, Homo sapiens
IIEYCCYGDL

SEQ ID NO: 2186 - protein, 10 aa, Homo sapiens
TIGGPTLVII

SEQ ID NO: 2187 - protein, 9 aa, Homo sapiens
VIIEYCCYG

SEQ ID NO: 2188 - protein, 10 aa, Homo sapiens
HMNIANLLGA

SEQ ID NO: 2189 - protein, 10 aa, Homo sapiens
IANLLGACTI

SEQ ID NO: 2190 - protein, 9 aa, Homo sapiens
MNIANLLGA

SEQ ID NO: 2191 - protein, 9 aa, Homo sapiens
YLGNHMNIA

SEQ ID NO: 2192 - protein, 10 aa, Homo sapiens
YLGNHMNIAN

SEQ ID NO: 2193 - protein, 9 aa, Homo sapiens
VLHESNSPY

SEQ ID NO: 2194 - protein, 10 aa, Homo sapiens
VLHESNSPYI

SEQ ID NO: 2195 - protein, 10 aa, Homo sapiens
LQVLHECNSL

SEQ ID NO: 2196 - protein, 10 aa, Homo sapiens
LYIVGFYGAF

SEQ ID NO: 2197 - protein, 9 aa, Homo sapiens
NSLYIVGFY

SEQ ID NO: 2198 - protein, 9 aa, Homo sapiens
QVLHECNSL

SEQ ID NO: 2199 - protein, 9 aa, Homo sapiens
SLYIVGFYG

SEQ ID NO: 2200 - protein, 10 aa, Homo sapiens
SLYIVGFYGA

SEQ ID NO: 2201 - protein, 9 aa, Homo sapiens
VLHECNSLY

SEQ ID NO: 2202 - protein, 10 aa, Homo sapiens
VLHECNSLYI

SEQ ID NO: 2203 - protein, 10 aa, Homo sapiens
FYQQQQQSDL

SEQ ID NO: 2204 - protein, 10 aa, Homo sapiens
QQQSDLQPPA

SEQ ID NO: 2205 - protein, 9 aa, Homo sapiens
QQSDLQPPA

SEQ ID NO: 2206 - protein, 9 aa, Homo sapiens
YQQQQQSDL

SEQ ID NO: 2207 - protein, 9 aa, Homo sapiens
FELLSTPPL

SEQ ID NO: 2208 - protein, 10 aa, Homo sapiens
LLSTPPLSPS

SEQ ID NO: 2209 - protein, 9 aa, Homo sapiens
FELLPIPPL

SEQ ID NO: 2210 - protein, 10 aa, Homo sapiens
IWKKFELLPI

SEQ ID NO: 2211 - protein, 10 aa, Homo sapiens
LLPIPPLSPS

SEQ ID NO: 2212 - protein, 9 aa, Homo sapiens
LPIPPLSPS

SEQ ID NO: 2213 - protein, 10 aa, Homo sapiens
IIEYCFYGDL

SEQ ID NO: 2214 - protein, 9 aa, Homo sapiens
IIIEYCFYG

SEQ ID NO: 2215 - protein, 9 aa, Homo sapiens
IYIIIEYCF

SEQ ID NO: 2216 - protein, 10 aa, Homo sapiens
IYIIIEYCFY

SEQ ID NO: 2217 - protein, 10 aa, Homo sapiens
YIIIEYCFYG

SEQ ID NO: 2218 - protein, 10 aa, Homo sapiens
KITEQEKDFL

SEQ ID NO: 2219 - protein, 11 aa, Homo sapiens
STRDPLSEITK

SEQ ID NO: 2220 - protein, 8 aa, Homo sapiens
DPLSEITK

SEQ ID NO: 2221 - protein, 10 aa, Homo sapiens
LPLKFRDAET

SEQ ID NO: 2222 - protein, 10 aa, Homo sapiens
QTGVMICAYL

SEQ ID NO: 2223 - protein, 10 aa, Homo sapiens
AFSGEYIPTV

SEQ ID NO: 2224 - protein, 9 aa, Homo sapiens
SMNRRPILT

SEQ ID NO: 2225 - protein, 10 aa, Homo sapiens
YMCNSSCMGS

SEQ ID NO: 2226 - protein, 9 aa, Homo sapiens
GMNQRPILT

SEQ ID NO: 2227 - protein, 9 aa, Homo sapiens
GMNWRPILT

SEQ ID NO: 2228 - protein, 10 aa, Homo sapiens
LLGRNSFEVC

SEQ ID NO: 2229 - protein, 9 aa, Homo sapiens
ALKYIFVAV

SEQ ID NO: 2230 - protein, 10 aa, Homo sapiens
ALKYIFVAVR

SEQ ID NO: 2231 - protein, 9 aa, Homo sapiens
AVRAICVMK

SEQ ID NO: 2232 - protein, 10 aa, Homo sapiens
AVRAICVMKS

SEQ ID NO: 2233 - protein, 9 aa, Homo sapiens
CVEKKTALK

SEQ ID NO: 2234 - protein, 10 aa, Homo sapiens
CVEKKTALKY

SEQ ID NO: 2235 - protein, 9 aa, Homo sapiens
CVMKSFLIF

SEQ ID NO: 2236 - protein, 10 aa, Homo sapiens
CVMKSFLIFR

SEQ ID NO: 2237 - protein, 9 aa, Homo sapiens
FLIFRRWKS

SEQ ID NO: 2238 - protein, 10 aa, Homo sapiens
FRRWKSHSPL

SEQ ID NO: 2239 - protein, 9 aa, Homo sapiens
FVAVRAICV

SEQ ID NO: 2240 - protein, 10 aa, Homo sapiens
FVAVRAICVM

SEQ ID NO: 2241 - protein, 9 aa, Homo sapiens
IQLHLSHPI

SEQ ID NO: 2242 - protein, 10 aa, Homo sapiens
KSFLIFRRWK

SEQ ID NO: 2243 - protein, 9 aa, Homo sapiens
KTALKYIFV

SEQ ID NO: 2244 - protein, 10 aa, Homo sapiens
KYIFVAVRAI

SEQ ID NO: 2245 - protein, 10 aa, Homo sapiens
RWKSHSPLQI

SEQ ID NO: 2246 - protein, 10 aa, Homo sapiens
TALKYIFVAV

SEQ ID NO: 2247 - protein, 10 aa, Homo sapiens
VAVRAICVMK

SEQ ID NO: 2248 - protein, 9 aa, Homo sapiens
VMKSFLIFR

SEQ ID NO: 2249 - protein, 10 aa, Homo sapiens
VMKSFLIFRR

SEQ ID NO: 2250 - protein, 9 aa, Homo sapiens
YIFVAVRAI

SEQ ID NO: 2251 - protein, 9 aa, Homo sapiens
ALFFFFFET

SEQ ID NO: 2252 - protein, 10 aa, Homo sapiens
ALFFFFFETK

SEQ ID NO: 2253 - protein, 10 aa, Homo sapiens
AQAGVQWRSL

SEQ ID NO: 2254 - protein, 10 aa, Homo sapiens
CLANFCIFNR

SEQ ID NO: 2255 - protein, 10 aa, Homo sapiens
CLSFLSSWDY

SEQ ID NO: 2256 - protein, 9 aa, Homo sapiens
FFETKSCSV

SEQ ID NO: 2257 - protein, 10 aa, Homo sapiens
FFFETKSCSV

SEQ ID NO: 2258 - protein, 10 aa, Homo sapiens
FKLFSCLSFL

SEQ ID NO: 2259 - protein, 10 aa, Homo sapiens
FLSSWDYRRM

SEQ ID NO: 2260 - protein, 10 aa, Homo sapiens
GFKLFSCLSF

SEQ ID NO: 2261 - protein, 9 aa, Homo sapiens
KLFSCLSFL

SEQ ID NO: 2262 - protein, 10 aa, Homo sapiens
KLFSCLSFLS

SEQ ID NO: 2263 - protein, 10 aa, Homo sapiens
LALFFFFFET

SEQ ID NO: 2264 - protein, 9 aa, Homo sapiens
LFFFFFETK

SEQ ID NO: 2265 - protein, 9 aa, Homo sapiens
LSFLSSWDY

SEQ ID NO: 2266 - protein, 10 aa, Homo sapiens
LSFLSSWDYR

SEQ ID NO: 2267 - protein, 9 aa, Homo sapiens
RMPPCLANF

SEQ ID NO: 2268 - protein, 10 aa, Homo sapiens
RRMPPCLANF

SEQ ID NO: 2269 - protein, 10 aa, Homo sapiens
SLQPPPPGFK

SEQ ID NO: 2270 - protein, 9 aa, Homo sapiens
VQWRSLGSL

SEQ ID NO: 2271 - protein, 9 aa, Homo sapiens
FFFSVIFST

SEQ ID NO: 2272 - protein, 10 aa, Homo sapiens
MSVCFFFFSV

SEQ ID NO: 2273 - protein, 9 aa, Homo sapiens
SVCFFFFSV

SEQ ID NO: 2274 - protein, 10 aa, Homo sapiens
SVCFFFFSVI

SEQ ID NO: 2275 - protein, 10 aa, Homo sapiens
FFCYILNTMF

SEQ ID NO: 2276 - protein, 10 aa, Homo sapiens
MSVCFFFFCY

SEQ ID NO: 2277 - protein, 10 aa, Homo sapiens
SVCFFFFCYI

SEQ ID NO: 2278 - protein, 9 aa, Homo sapiens
KQWSSVTSL

SEQ ID NO: 2279 - protein, 9 aa, Homo sapiens
VLWMPTSTV

SEQ ID NO: 2280 - protein, 9 aa, Homo sapiens
ILIRKAMTV

SEQ ID NO: 2281 - protein, 8 aa, Homo sapiens
RMKVPLMK

SEQ ID NO: 2282 - protein, 9 aa, Homo sapiens
TLKKKPRDI

SEQ ID NO: 2283 - protein, 10 aa, Homo sapiens
LIEGFEALLK

SEQ ID NO: 2284 - protein, 9 aa, Homo sapiens
QQLKWTPHI

SEQ ID NO: 2285 - protein, 10 aa, Homo sapiens
QLKWTPHILK

SEQ ID NO: 2286 - protein, 10 aa, Homo sapiens
IVSEKNQQLK

SEQ ID NO: 2287 - protein, 10 aa, Homo sapiens
QLKWTPHILK

SEQ ID NO: 2288 - protein, 9 aa, Homo sapiens
QQLKWTPHI

SEQ ID NO: 2289 - protein, 11 aa, Homo sapiens
NQQLKWTPHIL

SEQ ID NO: 2290 - protein, 10 aa, Homo sapiens
NQQLKWTPHI

SEQ ID NO: 2291 - protein, 9 aa, Homo sapiens
QLKWTPHIL

SEQ ID NO: 2292 - protein, 10 aa, Homo sapiens
GPPRPPRAAC

SEQ ID NO: 2293 - protein, 9 aa, Homo sapiens
PPRPPRAAC

SEQ ID NO: 2294 - protein, 9 aa, Homo sapiens
SLRRKYLRV

SEQ ID NO: 2295 - protein, 10 aa, Homo sapiens
SAACHRRGCV

SEQ ID NO: 2296 - protein, 10 aa, Homo sapiens
ALWECSLPQA

SEQ ID NO: 2297 - protein, 9 aa, Homo sapiens
CLIVSRTLL

SEQ ID NO: 2298 - protein, 10 aa, Homo sapiens
CLIVSRTLLL

SEQ ID NO: 2299 - protein, 9 aa, Homo sapiens
FLLALWECS

SEQ ID NO: 2300 - protein, 10 aa, Homo sapiens
FLLALWECSL

SEQ ID NO: 2301 - protein, 9 aa, Homo sapiens
IVSRTLLLV

SEQ ID NO: 2302 - protein, 9 aa, Homo sapiens
LIVSRTLLL

SEQ ID NO: 2303 - protein, 10 aa, Homo sapiens
LIVSRTLLLV

SEQ ID NO: 2304 - protein, 9 aa, Homo sapiens
LLALWECSL

SEQ ID NO: 2305 - protein, 9 aa, Homo sapiens
LPQARLCLI

SEQ ID NO: 2306 - protein, 10 aa, Homo sapiens
LPQARLCLIV

SEQ ID NO: 2307 - protein, 10 aa, Homo sapiens
NVRDKKRATF

SEQ ID NO: 2308 - protein, 10 aa, Homo sapiens
SLPQARLCLI

SEQ ID NO: 2309 - protein, 9 aa, Homo sapiens
FFCWILSCK

SEQ ID NO: 2310 - protein, 10 aa, Homo sapiens
FFFCWILSCK

SEQ ID NO: 2311 - protein, 9 aa, Homo sapiens
ITAFFFCWI

SEQ ID NO: 2312 - protein, 10 aa, Homo sapiens
LYITAFFFCW

SEQ ID NO: 2313 - protein, 10 aa, Homo sapiens
YITAFFFCWI

SEQ ID NO: 2314 - protein, 9 aa, Homo sapiens
ITAFFLLDI

SEQ ID NO: 2315 - protein, 9 aa, Homo sapiens
LLYITAFFL

SEQ ID NO: 2316 - protein, 10 aa, Homo sapiens
LLYITAFFLL

SEQ ID NO: 2317 - protein, 9 aa, Homo sapiens
LYITAFFLL

SEQ ID NO: 2318 - protein, 10 aa, Homo sapiens
LYITAFFLLD

SEQ ID NO: 2319 - protein, 10 aa, Homo sapiens
YITAFFLLDI

SEQ ID NO: 2320 - protein, 9 aa, Homo sapiens
GSNEVTTRY

SEQ ID NO: 2321 - protein, 9 aa, Homo sapiens
MPKDVNIQV

SEQ ID NO: 2322 - protein, 10 aa, Homo sapiens
TGSNEVTTRY

SEQ ID NO: 2323 - protein, 10 aa, Homo sapiens
KKLMLLRLNL

SEQ ID NO: 2324 - protein, 9 aa, Homo sapiens
KLMLLRLNL

SEQ ID NO: 2325 - protein, 10 aa, Homo sapiens
KLMLLRLNLR

SEQ ID NO: 2326 - protein, 9 aa, Homo sapiens
LLRLNLRKM

SEQ ID NO: 2327 - protein, 8 aa, Homo sapiens
LMLLRLNL

SEQ ID NO: 2328 - protein, 10 aa, Homo sapiens
LMLLRLNLRK

SEQ ID NO: 2329 - protein, 10 aa, Homo sapiens
LNLRKMCGPF

SEQ ID NO: 2330 - protein, 9 aa, Homo sapiens
MLLRLNLRK

SEQ ID NO: 2331 - protein, 10 aa, Homo sapiens
MLLRLNLRKM

SEQ ID NO: 2332 - protein, 9 aa, Homo sapiens
NLRKMCGPF

SEQ ID NO: 2333 - protein, 10 aa, Homo sapiens
NYCQKKLMLL

SEQ ID NO: 2334 - protein, 9 aa, Homo sapiens
YCQKKLMLL

SEQ ID NO: 2335 - protein, 10 aa, Homo sapiens
FKKKTYTCAI

SEQ ID NO: 2336 - protein, 10 aa, Homo sapiens
ITTVKATETK

SEQ ID NO: 2337 - protein, 9 aa, Homo sapiens
KSKKKETFK

SEQ ID NO: 2338 - protein, 10 aa, Homo sapiens
KSKKKETFKK

SEQ ID NO: 2339 - protein, 10 aa, Homo sapiens
KTYTCAITTV

SEQ ID NO: 2340 - protein, 9 aa, Homo sapiens
TFKKKTYTC

SEQ ID NO: 2341 - protein, 9 aa, Homo sapiens
TYTCAITTV

SEQ ID NO: 2342 - protein, 10 aa, Homo sapiens
TYTCAITTVK

SEQ ID NO: 2343 - protein, 9 aa, Homo sapiens
YTCAITTVK

SEQ ID NO: 2344 - protein, 9 aa, Homo sapiens
TAKSKKRNL

SEQ ID NO: 2345 - protein, 9 aa, Homo sapiens
FALCGFWQI

SEQ ID NO: 2346 - protein, 8 aa, Homo sapiens
LKKLRSPL

SEQ ID NO: 2347 - protein, 8 aa, Homo sapiens
SLKKVPAL

SEQ ID NO: 2348 - protein, 10 aa, Homo sapiens
RKISNWSLKK

SEQ ID NO: 2349 - protein, 11 aa, Homo sapiens
VPALKKLRSPL

SEQ ID NO: 2350 - protein, 10 aa, Homo sapiens
KRVNTAWKTK

SEQ ID NO: 2351 - protein, 10 aa, Homo sapiens
MTKKKRVNTA

SEQ ID NO: 2352 - protein, 9 aa, Homo sapiens
RVNTAWKTK

SEQ ID NO: 2353 - protein, 10 aa, Homo sapiens
RVNTAWKTKK

SEQ ID NO: 2354 - protein, 9 aa, Homo sapiens
TKKKRVNTA

SEQ ID NO: 2355 - protein, 10 aa, Homo sapiens
WKTKKTSFSL

SEQ ID NO: 2356 - protein, 9 aa, Homo sapiens
ALMSAMTTS

SEQ ID NO: 2357 - protein, 9 aa, Homo sapiens
AMTTSSSQK

SEQ ID NO: 2358 - protein, 10 aa, Homo sapiens
AMTTSSSQKN

SEQ ID NO: 2359 - protein, 9 aa, Homo sapiens
CIMKEKKSL

SEQ ID NO: 2360 - protein, 10 aa, Homo sapiens
CIMKEKKSLV

SEQ ID NO: 2361 - protein, 8 aa, Homo sapiens
IMKEKKSL

SEQ ID NO: 2362 - protein, 9 aa, Homo sapiens
IMKEKKSLV

SEQ ID NO: 2363 - protein, 10 aa, Homo sapiens
KSLVRLSSCV

SEQ ID NO: 2364 - protein, 10 aa, Homo sapiens
LVRLSSCVPV

SEQ ID NO: 2365 - protein, 9 aa, Homo sapiens
RLSSCVPVA

SEQ ID NO: 2366 - protein, 10 aa, Homo sapiens
RLSSCVPVAL

SEQ ID NO: 2367 - protein, 10 aa, Homo sapiens
SAMTTSSSQK

SEQ ID NO: 2368 - protein, 9 aa, Homo sapiens
SLVRLSSCV

SEQ ID NO: 2369 - protein, 9 aa, Homo sapiens
VPVALMSAM

SEQ ID NO: 2370 - protein, 10 aa, Homo sapiens
VRLSSCVPVA

SEQ ID NO: 2371 - protein, 9 aa, Homo sapiens
KMRKKYAQK

SEQ ID NO: 2372 - protein, 9 aa, Homo sapiens
FVMSDTTYK

SEQ ID NO: 2373 - protein, 10 aa, Homo sapiens
FVMSDTTYKI

SEQ ID NO: 2374 - protein, 9 aa, Homo sapiens
KTFEKKGEK

SEQ ID NO: 2375 - protein, 10 aa, Homo sapiens
LFVMSDTTYK

SEQ ID NO: 2376 - protein, 9 aa, Homo sapiens
MSDTTYKIY

SEQ ID NO: 2377 - protein, 9 aa, Homo sapiens
VMSDTTYKI

SEQ ID NO: 2378 - protein, 10 aa, Homo sapiens
VMSDTTYKIY

SEQ ID NO: 2379 - protein, 10 aa, Homo sapiens
YLTKWPKFFL

SEQ ID NO: 2380 - protein, 9 aa, Homo sapiens
FLQERNLPP

SEQ ID NO: 2381 - protein, 9 aa, Homo sapiens
FRRPHSCLA

SEQ ID NO: 2382 - protein, 9 aa, Homo sapiens
LIVLRVVRL

SEQ ID NO: 2383 - protein, 9 aa, Homo sapiens
LLSVHLIVL

SEQ ID NO: 2384 - protein, 9 aa, Homo sapiens
EVKHLHHLL

SEQ ID NO: 2385 - protein, 10 aa, Homo sapiens
HLHHLLKQLK

SEQ ID NO: 2386 - protein, 9 aa, Homo sapiens
HLLLKRERV

SEQ ID NO: 2387 - protein, 9 aa, Homo sapiens
KIKHLLLKR

SEQ ID NO: 2388 - protein, 9 aa, Homo sapiens
KPSEKYLKI

SEQ ID NO: 2389 - protein, 9 aa, Homo sapiens
KYLKIKHLL

SEQ ID NO: 2390 - protein, 10 aa, Homo sapiens
KYLKIKHLLL

SEQ ID NO: 2391 - protein, 10 aa, Homo sapiens
LLKQLKPSEK

SEQ ID NO: 2392 - protein, 9 aa, Homo sapiens
LLKRERVDL

SEQ ID NO: 2393 - protein, 10 aa, Homo sapiens
LLLKRERVDL

SEQ ID NO: 2394 - protein, 10 aa, Homo sapiens
QLKPSEKYLK

SEQ ID NO: 2395 - protein, 9 aa, Homo sapiens
YLKIKHLLL

SEQ ID NO: 2396 - protein, 10 aa, Homo sapiens
YLKIKHLLLK

SEQ ID NO: 2397 - protein, 9 aa, Homo sapiens
ILPRKVLQM

SEQ ID NO: 2398 - protein, 9 aa, Homo sapiens
KVLQMDFLV

SEQ ID NO: 2399 - protein, 10 aa, Homo sapiens
LPRKVLQMDF

SEQ ID NO: 2400 - protein, 10 aa, Homo sapiens
LQMDFLVHPA

SEQ ID NO: 2401 - protein, 9 aa, Homo sapiens
QMDFLVHPA

SEQ ID NO: 2402 - protein, 10 aa, Homo sapiens
YILPRKVLQM

SEQ ID NO: 2403 - protein, 10 aa, Homo sapiens
APSPASRLQC

SEQ ID NO: 2404 - protein, 10 aa, Homo sapiens
HPLAPMPSKT

SEQ ID NO: 2405 - protein, 9 aa, Homo sapiens
ILPLPQLLL

SEQ ID NO: 2406 - protein, 9 aa, Homo sapiens
LLLSADQQA

SEQ ID NO: 2407 - protein, 9 aa, Homo sapiens
LPTQTRGCI

SEQ ID NO: 2408 - protein, 10 aa, Homo sapiens
LPTQTRGCIL

SEQ ID NO: 2409 - protein, 10 aa, Homo sapiens
RISCLPTQTR

SEQ ID NO: 2410 - protein, 9 aa, Homo sapiens
SLAETVSLH

SEQ ID NO: 2411 - protein, 9 aa, Homo sapiens
TPRSSSSSS

SEQ ID NO: 2412 - protein, 10 aa, Homo sapiens
TPRSSSSSSS

SEQ ID NO: 2413 - protein, 9 aa, Homo sapiens
ALPPVLLSL

SEQ ID NO: 2414 - protein, 10 aa, Homo sapiens
ALPPVLLSLA

SEQ ID NO: 2415 - protein, 9 aa, Homo sapiens
ALPRPLLAL

SEQ ID NO: 2416 - protein, 9 aa, Homo sapiens
ASRTASCIL

SEQ ID NO: 2417 - protein, 10 aa, Homo sapiens
EALPRPLLAL

SEQ ID NO: 2418 - protein, 9 aa, Homo sapiens
HLGHPVASR

SEQ ID NO: 2419 - protein, 9 aa, Homo sapiens
HPVASRTAS

SEQ ID NO: 2420 - protein, 10 aa, Homo sapiens
HPVASRTASC

SEQ ID NO: 2421 - protein, 10 aa, Homo sapiens
IIQLSLLSLL

SEQ ID NO: 2422 - protein, 9 aa, Homo sapiens
IQLSLLSLL

SEQ ID NO: 2423 - protein, 10 aa, Homo sapiens
IQLSLLSLLI

SEQ ID NO: 2424 - protein, 9 aa, Homo sapiens
LLALPPVLL

SEQ ID NO: 2425 - protein, 9 aa, Homo sapiens
LLIPPLTCL

SEQ ID NO: 2426 - protein, 10 aa, Homo sapiens
LLIPPLTCLA

SEQ ID NO: 2427 - protein, 9 aa, Homo sapiens
LLSLLIPPL

SEQ ID NO: 2428 - protein, 10 aa, Homo sapiens
LLSLLIPPLT

SEQ ID NO: 2429 - protein, 10 aa, Homo sapiens
LPRPLLALPP

SEQ ID NO: 2430 - protein, 9 aa, Homo sapiens
QLSLLSLLI

SEQ ID NO: 2431 - protein, 9 aa, Homo sapiens
RLLQCQATR

SEQ ID NO: 2432 - protein, 9 aa, Homo sapiens
RPLLALPPV

SEQ ID NO: 2433 - protein, 10 aa, Homo sapiens
RPLLALPPVL

SEQ ID NO: 2434 - protein, 9 aa, Homo sapiens
SLAQDHSRL

SEQ ID NO: 2435 - protein, 10 aa, Homo sapiens
SLAQDHSRLL

SEQ ID NO: 2436 - protein, 10 aa, Homo sapiens
SLLIPPLTCL

SEQ ID NO: 2437 - protein, 9 aa, Homo sapiens
SLLSLLIPP

SEQ ID NO: 2438 - protein, 10 aa, Homo sapiens
SLLSLLIPPL

SEQ ID NO: 2439 - protein, 10 aa, Homo sapiens
AAATSAASTL

SEQ ID NO: 2440 - protein, 10 aa, Homo sapiens
AAIPASTSAV

SEQ ID NO: 2441 - protein, 9 aa, Homo sapiens
AIPASTSAV

SEQ ID NO: 2442 - protein, 10 aa, Homo sapiens
ALPAGCVSSA

SEQ ID NO: 2443 - protein, 10 aa, Homo sapiens
APLLTATGSV

SEQ ID NO: 2444 - protein, 9 aa, Homo sapiens
APVLSASIL

SEQ ID NO: 2445 - protein, 9 aa, Homo sapiens
ATLLPATTV

SEQ ID NO: 2446 - protein, 10 aa, Homo sapiens
ATVSTTTAPV

SEQ ID NO: 2447 - protein, 10 aa, Homo sapiens
AVPANCLFPA

SEQ ID NO: 2448 - protein, 10 aa, Homo sapiens
CLFPAALPST

SEQ ID NO: 2449 - protein, 9 aa, Homo sapiens
CPTFVSAAA

SEQ ID NO: 2450 - protein, 9 aa, Homo sapiens
FPAALPSTA

SEQ ID NO: 2451 - protein, 10 aa, Homo sapiens
FPAALPSTAG

SEQ ID NO: 2452 - protein, 9 aa, Homo sapiens
GAECHGRPL

SEQ ID NO: 2453 - protein, 9 aa, Homo sapiens
GAISRFIWV

SEQ ID NO: 2454 - protein, 10 aa, Homo sapiens
ILPAAIPAST

SEQ ID NO: 2455 - protein, 10 aa, Homo sapiens
IWVSGILSPL

SEQ ID NO: 2456 - protein, 10 aa, Homo sapiens
LLTATGSVSL

SEQ ID NO: 2457 - protein, 9 aa, Homo sapiens
LLYTADSSL

SEQ ID NO: 2458 - protein, 9 aa, Homo sapiens
LPAAATSAA

SEQ ID NO: 2459 - protein, 10 aa, Homo sapiens
LPAAATSAAS

SEQ ID NO: 2460 - protein, 9 aa, Homo sapiens
LPAAIPAST

SEQ ID NO: 2461 - protein, 9 aa, Homo sapiens
LPAGCVSSA

SEQ ID NO: 2462 - protein, 10 aa, Homo sapiens
LPAGCVSSAP

SEQ ID NO: 2463 - protein, 9 aa, Homo sapiens
LYTADSSLW

SEQ ID NO: 2464 - protein, 9 aa, Homo sapiens
QPAKSSPSA

SEQ ID NO: 2465 - protein, 10 aa, Homo sapiens
QPAKSSPSAA

SEQ ID NO: 2466 - protein, 9 aa, Homo sapiens
RFIWVSGIL

SEQ ID NO: 2467 - protein, 9 aa, Homo sapiens
RPQRVWSTG

SEQ ID NO: 2468 - protein, 10 aa, Homo sapiens
RVWSTGPDSI

SEQ ID NO: 2469 - protein, 9 aa, Homo sapiens
SAVPGSIPL

SEQ ID NO: 2470 - protein, 9 aa, Homo sapiens
SILPAAIPA

SEQ ID NO: 2471 - protein, 9 aa, Homo sapiens
SLPAAATSA

SEQ ID NO: 2472 - protein, 10 aa, Homo sapiens
SLPAAATSAA

SEQ ID NO: 2473 - protein, 9 aa, Homo sapiens
SLWTTRPQR

SEQ ID NO: 2474 - protein, 10 aa, Homo sapiens
SLWTTRPQRV

SEQ ID NO: 2475 - protein, 9 aa, Homo sapiens
SPSAAAATL

SEQ ID NO: 2476 - protein, 10 aa, Homo sapiens
SPSAAAATLL

SEQ ID NO: 2477 - protein, 10 aa, Homo sapiens
TLDALPAGCV

SEQ ID NO: 2478 - protein, 9 aa, Homo sapiens
TVSTTTAPV

SEQ ID NO: 2479 - protein, 9 aa, Homo sapiens
VLSASILPA

SEQ ID NO: 2480 - protein, 10 aa, Homo sapiens
VLSASILPAA

SEQ ID NO: 2481 - protein, 9 aa, Homo sapiens
VPANCLFPA

SEQ ID NO: 2482 - protein, 10 aa, Homo sapiens
VPANCLFPAA

SEQ ID NO: 2483 - protein, 9 aa, Homo sapiens
VPDPSCPTF

SEQ ID NO: 2484 - protein, 9 aa, Homo sapiens
VPGSIPLPA

SEQ ID NO: 2485 - protein, 10 aa, Homo sapiens
VPGSIPLPAV

SEQ ID NO: 2486 - protein, 9 aa, Homo sapiens
WVSGILSPL

SEQ ID NO: 2487 - protein, 10 aa, Homo sapiens
YTADSSLWTT

SEQ ID NO: 2488 - protein, 9 aa, Homo sapiens
APAGMVNRA

SEQ ID NO: 2489 - protein, 9 aa, Homo sapiens
ASLHRRSYL

SEQ ID NO: 2490 - protein, 10 aa, Homo sapiens
ASLHRRSYLK

SEQ ID NO: 2491 - protein, 10 aa, Homo sapiens
FLLMDNKAPA

SEQ ID NO: 2492 - protein, 9 aa, Homo sapiens
HPRRSPSRL

SEQ ID NO: 2493 - protein, 9 aa, Homo sapiens
HPSLHISSP

SEQ ID NO: 2494 - protein, 10 aa, Homo sapiens
HRRSYLKIHL

SEQ ID NO: 2495 - protein, 10 aa, Homo sapiens
HSRFLLMDNK

SEQ ID NO: 2496 - protein, 10 aa, Homo sapiens
KLPIPSSASL

SEQ ID NO: 2497 - protein, 10 aa, Homo sapiens
KVLTLSSSSH

SEQ ID NO: 2498 - protein, 9 aa, Homo sapiens
LIHSRFLLM

SEQ ID NO: 2499 - protein, 9 aa, Homo sapiens
LLMDNKAPA

SEQ ID NO: 2500 - protein, 10 aa, Homo sapiens
LMDNKAPAGM

SEQ ID NO: 2501 - protein, 9 aa, Homo sapiens
LPIPSSASL

SEQ ID NO: 2502 - protein, 9 aa, Homo sapiens
MPNLRISSS

SEQ ID NO: 2503 - protein, 10 aa, Homo sapiens
MPNLRISSSH

SEQ ID NO: 2504 - protein, 10 aa, Homo sapiens
NLRISSSHSL

SEQ ID NO: 2505 - protein, 10 aa, Homo sapiens
PPTHSHRLSL

SEQ ID NO: 2506 - protein, 10 aa, Homo sapiens
RAGRRVPWAA

SEQ ID NO: 2507 - protein, 10 aa, Homo sapiens
RARLHITTSK

SEQ ID NO: 2508 - protein, 10 aa, Homo sapiens
RISSSHSLNH

SEQ ID NO: 2509 - protein, 9 aa, Homo sapiens
RLHTPPSSR

SEQ ID NO: 2510 - protein, 10 aa, Homo sapiens
RLHTPPSSRR

SEQ ID NO: 2511 - protein, 9 aa, Homo sapiens
RLRILSPSL

SEQ ID NO: 2512 - protein, 9 aa, Homo sapiens
RPLMPNLRI

SEQ ID NO: 2513 - protein, 9 aa, Homo sapiens
RPRPLMPNL

SEQ ID NO: 2514 - protein, 10 aa, Homo sapiens
SASLHRRSYL

SEQ ID NO: 2515 - protein, 9 aa, Homo sapiens
SLHISSPRL

SEQ ID NO: 2516 - protein, 9 aa, Homo sapiens
SLHRRSYLK

SEQ ID NO: 2517 - protein, 10 aa, Homo sapiens
SLHRRSYLKI

SEQ ID NO: 2518 - protein, 9 aa, Homo sapiens
SLIHSRFLL

SEQ ID NO: 2519 - protein, 10 aa, Homo sapiens
SLIHSRFLLM

SEQ ID NO: 2520 - protein, 9 aa, Homo sapiens
SLLTSSSNL

SEQ ID NO: 2521 - protein, 10 aa, Homo sapiens
SLNHHSSSPL

SEQ ID NO: 2522 - protein, 10 aa, Homo sapiens
SLSSPSKLPI

SEQ ID NO: 2523 - protein, 9 aa, Homo sapiens
SPLSLHTPS

SEQ ID NO: 2524 - protein, 10 aa, Homo sapiens
SPLSLHTPSS

SEQ ID NO: 2525 - protein, 9 aa, Homo sapiens
SPPTHSHRL

SEQ ID NO: 2526 - protein, 9 aa, Homo sapiens
SPRLHTPPS

SEQ ID NO: 2527 - protein, 10 aa, Homo sapiens
SPRLHTPPSS

SEQ ID NO: 2528 - protein, 10 aa, Homo sapiens
SPSLSSPSKL

SEQ ID NO: 2529 - protein, 9 aa, Homo sapiens
SYLKIHLGL

SEQ ID NO: 2530 - protein, 10 aa, Homo sapiens
TPSNHRPRPL

SEQ ID NO: 2531 - protein, 10 aa, Homo sapiens
TPSSHPSLHI

SEQ ID NO: 2532 - protein, 10 aa, Homo sapiens
CVPFWTGRIL

SEQ ID NO: 2533 - protein, 11 aa, Homo sapiens
HCVPFWTGRIL

SEQ ID NO: 2534 - protein, 9 aa, Homo sapiens
ILLPSAASV

SEQ ID NO: 2535 - protein, 10 aa, Homo sapiens
ILLPSAASVC

SEQ ID NO: 2536 - protein, 11 aa, Homo sapiens
LLPSAASVCPI

SEQ ID NO: 2537 - protein, 10 aa, Homo sapiens
LPSAASVCPI

SEQ ID NO: 2538 - protein, 8 aa, Homo sapiens
MRPHCVPF

SEQ ID NO: 2539 - protein, 10 aa, Homo sapiens
RILLPSAASV

SEQ ID NO: 2540 - protein, 9 aa, Homo sapiens
RMRPHCVPF

SEQ ID NO: 2541 - protein, 10 aa, Homo sapiens
RMRPHCVPFW

SEQ ID NO: 2542 - protein, 9 aa, Homo sapiens
RTNPTVRMR

SEQ ID NO: 2543 - protein, 9 aa, Homo sapiens
SVCPIPFEA

SEQ ID NO: 2544 - protein, 9 aa, Homo sapiens
TVRMRPHCV

SEQ ID NO: 2545 - protein, 11 aa, Homo sapiens
TVRMRPHCVPF

SEQ ID NO: 2546 - protein, 9 aa, Homo sapiens
VPFWTGRIL

SEQ ID NO: 2547 - protein, 10 aa, Homo sapiens
VPFWTGRILL

SEQ ID NO: 2548 - protein, 10 aa, Homo sapiens
VRMRPHCVPF

SEQ ID NO: 2549 - protein, 9 aa, Homo sapiens
AMVPRGVSM

SEQ ID NO: 2550 - protein, 10 aa, Homo sapiens
AMVPRGVSMA

SEQ ID NO: 2551 - protein, 10 aa, Homo sapiens
AWAPTSRTPW

SEQ ID NO: 2552 - protein, 10 aa, Homo sapiens
CPMPTTPVQA

SEQ ID NO: 2553 - protein, 10 aa, Homo sapiens
CPSTVPPSPA

SEQ ID NO: 2554 - protein, 10 aa, Homo sapiens
GAMVPRGVSM

SEQ ID NO: 2555 - protein, 10 aa, Homo sapiens
MPCPMPTTPV

SEQ ID NO: 2556 - protein, 9 aa, Homo sapiens
MPTTPVQAW

SEQ ID NO: 2557 - protein, 10 aa, Homo sapiens
MPTTPVQAWL

SEQ ID NO: 2558 - protein, 10 aa, Homo sapiens
SLPEDRYTQA

SEQ ID NO: 2559 - protein, 9 aa, Homo sapiens
SPAQPYLRV

SEQ ID NO: 2560 - protein, 10 aa, Homo sapiens
SPAQPYLRVS

SEQ ID NO: 2561 - protein, 9 aa, Homo sapiens
TIMPCPMPT

SEQ ID NO: 2562 - protein, 9 aa, Homo sapiens
TPVQAWLEA

SEQ ID NO: 2563 - protein, 9 aa, Homo sapiens
TSRTPWGAM

SEQ ID NO: 2564 - protein, 10 aa, Homo sapiens
VPPSPAQPYL

SEQ ID NO: 2565 - protein, 9 aa, Homo sapiens
VPRGVSMAH

SEQ ID NO: 2566 - protein, 10 aa, Homo sapiens
CLSARTGLSI

SEQ ID NO: 2567 - protein, 10 aa, Homo sapiens
CTTLNSPPLK

SEQ ID NO: 2568 - protein, 9 aa, Homo sapiens
GLSISCTTL

SEQ ID NO: 2569 - protein, 9 aa, Homo sapiens
SPPLKKMSM

SEQ ID NO: 2570 - protein, 9 aa, Homo sapiens
TLNSPPLKK

SEQ ID NO: 2571 - protein, 9 aa, Homo sapiens
TTLNSPPLK

SEQ ID NO: 2572 - protein, 10 aa, Homo sapiens
TTLNSPPLKK

SEQ ID NO: 2573 - protein, 9 aa, Homo sapiens
LQRFRFTHV

SEQ ID NO: 2574 - protein, 10 aa, Homo sapiens
LQRFRFTHVI

SEQ ID NO: 2575 - protein, 9 aa, Homo sapiens
RLSSVLQRF

SEQ ID NO: 2576 - protein, 10 aa, Homo sapiens
RLSSVLQRFR

SEQ ID NO: 2577 - protein, 10 aa, Homo sapiens
VLQRFRFTHV

SEQ ID NO: 2578 - protein, 10 aa, Homo sapiens
ASVGRHSLSK

SEQ ID NO: 2579 - protein, 9 aa, Homo sapiens
KFLPFWGFL

SEQ ID NO: 2580 - protein, 9 aa, Homo sapiens
LASVGRHSL

SEQ ID NO: 2581 - protein, 10 aa, Homo sapiens
LPFWGFLEEF

SEQ ID NO: 2582 - protein, 9 aa, Homo sapiens
PFWGFLEEF

SEQ ID NO: 2583 - protein, 9 aa, Homo sapiens
SVGRHSLSK

SEQ ID NO: 2584 - protein, 9 aa, Homo sapiens
APRPIRPPF

SEQ ID NO: 2585 - protein, 10 aa, Homo sapiens
APRPIRPPFL

SEQ ID NO: 2586 - protein, 10 aa, Homo sapiens
AQKMKKAHFL

SEQ ID NO: 2587 - protein, 9 aa, Homo sapiens
FLPSAAQKM

SEQ ID NO: 2588 - protein, 10 aa, Homo sapiens
GLFLPSAAQK

SEQ ID NO: 2589 - protein, 9 aa, Homo sapiens
HPLLVSLLL

SEQ ID NO: 2590 - protein, 10 aa, Homo sapiens
KAHFLKTWFR

SEQ ID NO: 2591 - protein, 9 aa, Homo sapiens
KARFSTASL

SEQ ID NO: 2592 - protein, 9 aa, Homo sapiens
KMKKAHFLK

SEQ ID NO: 2593 - protein, 10 aa, Homo sapiens
KTWFRSNPTK

SEQ ID NO: 2594 - protein, 9 aa, Homo sapiens
LAKELTHPL

SEQ ID NO: 2595 - protein, 10 aa, Homo sapiens
LAKELTHPLL

SEQ ID NO: 2596 - protein, 10 aa, Homo sapiens
NPTKTKKARF

SEQ ID NO: 2597 - protein, 9 aa, Homo sapiens
QKMKKAHFL

SEQ ID NO: 2598 - protein, 9 aa, Homo sapiens
RFSTASLAK

SEQ ID NO: 2599 - protein, 10 aa, Homo sapiens
RPIRPPFLES

SEQ ID NO: 2600 - protein, 9 aa, Homo sapiens
RSNPTKTKK

SEQ ID NO: 2601 - protein, 10 aa, Homo sapiens
SLAKELTHPL

SEQ ID NO: 2602 - protein, 9 aa, Homo sapiens
TKKARFSTA

SEQ ID NO: 2603 - protein, 9 aa, Homo sapiens
GLRFWNPSR

SEQ ID NO: 2604 - protein, 10 aa, Homo sapiens
ISQLLSWPQK

SEQ ID NO: 2605 - protein, 9 aa, Homo sapiens
RIAHISQLL

SEQ ID NO: 2606 - protein, 9 aa, Homo sapiens
RLGYSSHQL

SEQ ID NO: 2607 - protein, 9 aa, Homo sapiens
SQLLSWPQK

SEQ ID NO: 2608 - protein, 9 aa, Homo sapiens
SRIAHISQL

SEQ ID NO: 2609 - protein, 9 aa, Homo sapiens
WPQKTEERL

SEQ ID NO: 2610 - protein, 9 aa, Homo sapiens
YSSHQLPRK

SEQ ID NO: 2611 - protein, 10 aa, Homo sapiens
CPQRMTPGTT

SEQ ID NO: 2612 - protein, 9 aa, Homo sapiens
EAEKRTRTL

SEQ ID NO: 2613 - protein, 9 aa, Homo sapiens
GTTFITMMK

SEQ ID NO: 2614 - protein, 10 aa, Homo sapiens
GTTFITMMKK

SEQ ID NO: 2615 - protein, 10 aa, Homo sapiens
ITMMKKEAEK

SEQ ID NO: 2616 - protein, 9 aa, Homo sapiens
RMTPGTTFI

SEQ ID NO: 2617 - protein, 9 aa, Homo sapiens
SPYCPQRMT

SEQ ID NO: 2618 - protein, 9 aa, Homo sapiens
TMMKKEAEK

SEQ ID NO: 2619 - protein, 9 aa, Homo sapiens
TPGTTFITM

SEQ ID NO: 2620 - protein, 10 aa, Homo sapiens
TPGTTFITMM

SEQ ID NO: 2621 - protein, 9 aa, Homo sapiens
TTFITMMKK

SEQ ID NO: 2622 - protein, 9 aa, Homo sapiens
CPGATWREA

SEQ ID NO: 2623 - protein, 10 aa, Homo sapiens
CPGATWREAA

SEQ ID NO: 2624 - protein, 10 aa, Homo sapiens
RSRCPGATWR

SEQ ID NO: 2625 - protein, 9 aa, Homo sapiens
TPRATRSRC

SEQ ID NO: 2626 - protein, 10 aa, Homo sapiens
HVLPEPHLAL

SEQ ID NO: 2627 - protein, 10 aa, Homo sapiens
RPLQTHVLPE

SEQ ID NO: 2628 - protein, 10 aa, Homo sapiens
VLWTTPPLQH

SEQ ID NO: 2629 - protein, 10 aa, Homo sapiens
APSESPCSPF

SEQ ID NO: 2630 - protein, 10 aa, Homo sapiens
CPLDHTTPPA

SEQ ID NO: 2631 - protein, 9 aa, Homo sapiens
FLQEQYHEA

SEQ ID NO: 2632 - protein, 10 aa, Homo sapiens
RLAFLQEQYH

SEQ ID NO: 2633 - protein, 10 aa, Homo sapiens
SPCSPFRLAF

SEQ ID NO: 2634 - protein, 9 aa, Homo sapiens
SPPWVRALL

SEQ ID NO: 2635 - protein, 10 aa, Homo sapiens
YPACPLDHTT

SEQ ID NO: 2636 - protein, 9 aa, Homo sapiens
ALHLRSCPC

SEQ ID NO: 2637 - protein, 9 aa, Homo sapiens
CLHHRRHLV

SEQ ID NO: 2638 - protein, 10 aa, Homo sapiens
CLHHRRHLVC

SEQ ID NO: 2639 - protein, 10 aa, Homo sapiens
CLHRKSHPHL

SEQ ID NO: 2640 - protein, 9 aa, Homo sapiens
CLRSHACPP

SEQ ID NO: 2641 - protein, 9 aa, Homo sapiens
CLRSHTCPP

SEQ ID NO: 2642 - protein, 9 aa, Homo sapiens
CLWCHACLH

SEQ ID NO: 2643 - protein, 9 aa, Homo sapiens
CPHHLKNHL

SEQ ID NO: 2644 - protein, 9 aa, Homo sapiens
CPHHLKNLL

SEQ ID NO: 2645 - protein, 9 aa, Homo sapiens
CPHHLRTRL

SEQ ID NO: 2646 - protein, 10 aa, Homo sapiens
CPLHLRSLPF

SEQ ID NO: 2647 - protein, 10 aa, Homo sapiens
CPLPRHLKHL

SEQ ID NO: 2648 - protein, 10 aa, Homo sapiens
CPLSLRSHPC

SEQ ID NO: 2649 - protein, 10 aa, Homo sapiens
CPRHLRNCPL

SEQ ID NO: 2650 - protein, 9 aa, Homo sapiens
FPHHLRHHA

SEQ ID NO: 2651 - protein, 10 aa, Homo sapiens
FPHHLRHHAC

SEQ ID NO: 2652 - protein, 9 aa, Homo sapiens
GLRSRTCPP

SEQ ID NO: 2653 - protein, 10 aa, Homo sapiens
HACLHRLRNL

SEQ ID NO: 2654 - protein, 9 aa, Homo sapiens
HLACLHHLR

SEQ ID NO: 2655 - protein, 9 aa, Homo sapiens
HLCPPHLRY

SEQ ID NO: 2656 - protein, 10 aa, Homo sapiens
HLCPPHLRYR

SEQ ID NO: 2657 - protein, 9 aa, Homo sapiens
HLKHLACLH

SEQ ID NO: 2658 - protein, 9 aa, Homo sapiens
HLKHRPCPH

SEQ ID NO: 2659 - protein, 9 aa, Homo sapiens
HLKNHLCPP

SEQ ID NO: 2660 - protein, 9 aa, Homo sapiens
HLKSHPCLH

SEQ ID NO: 2661 - protein, 9 aa, Homo sapiens
HLKSLLCPL

SEQ ID NO: 2662 - protein, 9 aa, Homo sapiens
HLLHLRRLY

SEQ ID NO: 2663 - protein, 9 aa, Homo sapiens
HLRNCPLPR

SEQ ID NO: 2664 - protein, 10 aa, Homo sapiens
HLRNCPLPRH

SEQ ID NO: 2665 - protein, 10 aa, Homo sapiens
HLRRLYPHHL

SEQ ID NO: 2666 - protein, 9 aa, Homo sapiens
HLRSHPCPL

SEQ ID NO: 2667 - protein, 10 aa, Homo sapiens
HLRSHPCPLH

SEQ ID NO: 2668 - protein, 9 aa, Homo sapiens
HLRSLPFPH

SEQ ID NO: 2669 - protein, 9 aa, Homo sapiens
HLRTRLCPH

SEQ ID NO: 2670 - protein, 9 aa, Homo sapiens
HLVCSHHLK

SEQ ID NO: 2671 - protein, 10 aa, Homo sapiens
HPCLHHRRHL

SEQ ID NO: 2672 - protein, 9 aa, Homo sapiens
HPGLRSRTC

SEQ ID NO: 2673 - protein, 10 aa, Homo sapiens
HPHLLHLRRL

SEQ ID NO: 2674 - protein, 9 aa, Homo sapiens
HRKSHPHLL

SEQ ID NO: 2675 - protein, 9 aa, Homo sapiens
HRRTRSCPC

SEQ ID NO: 2676 - protein, 10 aa, Homo sapiens
KSHPHLLHLR

SEQ ID NO: 2677 - protein, 10 aa, Homo sapiens
KSLLCPLHLR

SEQ ID NO: 2678 - protein, 10 aa, Homo sapiens
LLCPLHLRSL

SEQ ID NO: 2679 - protein, 10 aa, Homo sapiens
LLHLRRLYPH

SEQ ID NO: 2680 - protein, 9 aa, Homo sapiens
LPRHLKHLA

SEQ ID NO: 2681 - protein, 10 aa, Homo sapiens
LPRHLKHLAC

SEQ ID NO: 2682 - protein, 9 aa, Homo sapiens
LRRLRSHTC

SEQ ID NO: 2683 - protein, 9 aa, Homo sapiens
LRRLYPHHL

SEQ ID NO: 2684 - protein, 10 aa, Homo sapiens
LVCSHHLKSL

SEQ ID NO: 2685 - protein, 10 aa, Homo sapiens
NLRNHTCPPS

SEQ ID NO: 2686 - protein, 9 aa, Homo sapiens
PLHLRSLPF

SEQ ID NO: 2687 - protein, 10 aa, Homo sapiens
RLCPHHLKNH

SEQ ID NO: 2688 - protein, 9 aa, Homo sapiens
RLYPHHLKH

SEQ ID NO: 2689 - protein, 10 aa, Homo sapiens
RLYPHHLKHR

SEQ ID NO: 2690 - protein, 10 aa, Homo sapiens
RPCPHHLKNL

SEQ ID NO: 2691 - protein, 10 aa, Homo sapiens
RSHPCPLHLK

SEQ ID NO: 2692 - protein, 10 aa, Homo sapiens
RSLPFPHHLR

SEQ ID NO: 2693 - protein, 9 aa, Homo sapiens
RTRLCPHHL

SEQ ID NO: 2694 - protein, 10 aa, Homo sapiens
RTRLCPHHLK

SEQ ID NO: 2695 - protein, 9 aa, Homo sapiens
SLLCPLHLR

SEQ ID NO: 2696 - protein, 9 aa, Homo sapiens
SLRSHACPP

SEQ ID NO: 2697 - protein, 9 aa, Homo sapiens
SPLRSQANA

SEQ ID NO: 2698 - protein, 9 aa, Homo sapiens
YLRRLRSHT

SEQ ID NO: 2699 - protein, 10 aa, Homo sapiens
YPHHLKHRPC

SEQ ID NO: 2700 - protein, 9 aa, Homo sapiens
FITSGQIFK

SEQ ID NO: 2701 - protein, 9 aa, Homo sapiens
IFITSGQIF

SEQ ID NO: 2702 - protein, 9 aa, Homo sapiens
SQSEALCVL

SEQ ID NO: 2703 - protein, 10 aa, Homo sapiens
SQSEALCVLL

SEQ ID NO: 2704 - protein, 9 aa, Homo sapiens
AYTGTILMM

SEQ ID NO: 2705 - protein, 10 aa, Homo sapiens
DLKAYTGTIL

SEQ ID NO: 2706 - protein, 9 aa, Homo sapiens
ILTKQIKTK

SEQ ID NO: 2707 - protein, 9 aa, Homo sapiens
KMILTKQIK

SEQ ID NO: 2708 - protein, 9 aa, Homo sapiens
KPTDTFLQI

SEQ ID NO: 2709 - protein, 10 aa, Homo sapiens
KPTDTFLQIL

SEQ ID NO: 2710 - protein, 10 aa, Homo sapiens
MILTKQIKTK

SEQ ID NO: 2711 - protein, 10 aa, Homo sapiens
ITRYTIFVLK

SEQ ID NO: 2712 - protein, 9 aa, Homo sapiens
LIAELHNIL

SEQ ID NO: 2713 - protein, 10 aa, Homo sapiens
LIAELHNILL

SEQ ID NO: 2714 - protein, 10 aa, Homo sapiens
MTPPNLIAEL

SEQ ID NO: 2715 - protein, 9 aa, Homo sapiens
NLIAELHNI

SEQ ID NO: 2716 - protein, 10 aa, Homo sapiens
NLIAELHNIL

SEQ ID NO: 2717 - protein, 10 aa, Homo sapiens
RYTIFVLKDI

SEQ ID NO: 2718 - protein, 10 aa, Homo sapiens
TITRYTIFVL

SEQ ID NO: 2719 - protein, 9 aa, Homo sapiens
TPPNLIAEL

SEQ ID NO: 2720 - protein, 9 aa, Homo sapiens
FLQFRTHTT

SEQ ID NO: 2721 - protein, 10 aa, Homo sapiens
LPAKGEDIFL

SEQ ID NO: 2722 - protein, 10 aa, Homo sapiens
LQFRTHTTGR

SEQ ID NO: 2723 - protein, 9 aa, Homo sapiens
NLQSSVCGL

SEQ ID NO: 2724 - protein, 9 aa, Homo sapiens
SSVCGLPAK

SEQ ID NO: 2725 - protein, 10 aa, Homo sapiens
VQWRNLQSSV

SEQ ID NO: 2726 - protein, 9 aa, Homo sapiens
GQNVSLLGK

SEQ ID NO: 2727 - protein, 10 aa, Homo sapiens
HTRTRGNLRK

SEQ ID NO: 2728 - protein, 10 aa, Homo sapiens
ILHTRTRGNL

SEQ ID NO: 2729 - protein, 10 aa, Homo sapiens
KGQNVSLLGK

SEQ ID NO: 2730 - protein, 9 aa, Homo sapiens
LLGKYILHT

SEQ ID NO: 2731 - protein, 10 aa, Homo sapiens
LRKSRKWKSM

SEQ ID NO: 2732 - protein, 9 aa, Homo sapiens
SLLGKYILH

SEQ ID NO: 2733 - protein, 10 aa, Homo sapiens
SLLGKYILHT

SEQ ID NO: 2734 - protein, 9 aa, Homo sapiens
CTSPLLAPV

SEQ ID NO: 2735 - protein, 9 aa, Homo sapiens
FPENLPGQL

SEQ ID NO: 2736 - protein, 10 aa, Homo sapiens
GLLAFWDSQV

SEQ ID NO: 2737 - protein, 9 aa, Homo sapiens
IFCPFPENL

SEQ ID NO: 2738 - protein, 9 aa, Homo sapiens
LLAFWDSQV

SEQ ID NO: 2739 - protein, 9 aa, Homo sapiens
LLAPVIFCP

SEQ ID NO: 2740 - protein, 10 aa, Homo sapiens
LLAPVIFCPF

SEQ ID NO: 2741 - protein, 9 aa, Homo sapiens
LPCPQQDVL

SEQ ID NO: 2742 - protein, 9 aa, Homo sapiens
RFPSGLLAF

SEQ ID NO: 2743 - protein, 10 aa, Homo sapiens
RFPSGLLAFW

SEQ ID NO: 2744 - protein, 9 aa, Homo sapiens
SPLLAPVIF

SEQ ID NO: 2745 - protein, 9 aa, Homo sapiens
SPRGPCTSS

SEQ ID NO: 2746 - protein, 10 aa, Homo sapiens
SPRGPCTSSS

SEQ ID NO: 2747 - protein, 9 aa, Homo sapiens
SQVCDLHVL

SEQ ID NO: 2748 - protein, 10 aa, Homo sapiens
VIFCPFPENL

SEQ ID NO: 2749 - protein, 9 aa, Homo sapiens
AMVWPLLSI

SEQ ID NO: 2750 - protein, 10 aa, Homo sapiens
AMVWPLLSIL

SEQ ID NO: 2751 - protein, 9 aa, Homo sapiens
AQIAMVWPL

SEQ ID NO: 2752 - protein, 10 aa, Homo sapiens
AQIAMVWPLL

SEQ ID NO: 2753 - protein, 9 aa, Homo sapiens
CPMSRLRLA

SEQ ID NO: 2754 - protein, 10 aa, Homo sapiens
CPMSRLRLAL

SEQ ID NO: 2755 - protein, 10 aa, Homo sapiens
IAMVWPLLSI

SEQ ID NO: 2756 - protein, 10 aa, Homo sapiens
ILSEWKEICV

SEQ ID NO: 2757 - protein, 9 aa, Homo sapiens
IVWWCPMSR

SEQ ID NO: 2758 - protein, 10 aa, Homo sapiens
IVWWCPMSRL

SEQ ID NO: 2759 - protein, 10 aa, Homo sapiens
IWMTETLFDI

SEQ ID NO: 2760 - protein, 9 aa, Homo sapiens
LLSILSEWK

SEQ ID NO: 2761 - protein, 9 aa, Homo sapiens
MSAAQIAMV

SEQ ID NO: 2762 - protein, 9 aa, Homo sapiens
MSRLRLALT

SEQ ID NO: 2763 - protein, 10 aa, Homo sapiens
MSRLRLALTV

SEQ ID NO: 2764 - protein, 9 aa, Homo sapiens
MVWPLLSIL

SEQ ID NO: 2765 - protein, 10 aa, Homo sapiens
RLALTVPPST

SEQ ID NO: 2766 - protein, 9 aa, Homo sapiens
TLFDIVWWC

SEQ ID NO: 2767 - protein, 10 aa, Homo sapiens
TLFDIVWWCP

SEQ ID NO: 2768 - protein, 10 aa, Homo sapiens
TMSAAQIAMV

SEQ ID NO: 2769 - protein, 10 aa, Homo sapiens
VWSIWMTETL

SEQ ID NO: 2770 - protein, 9 aa, Homo sapiens
WMTETLFDI

SEQ ID NO: 2771 - protein, 10 aa, Homo sapiens
WMTETLFDIV

SEQ ID NO: 2772 - protein, 9 aa, Homo sapiens
ALRCVFVPV

SEQ ID NO: 2773 - protein, 10 aa, Homo sapiens
ALRCVFVPVL

SEQ ID NO: 2774 - protein, 9 aa, Homo sapiens
ALSEHCPTT

SEQ ID NO: 2775 - protein, 10 aa, Homo sapiens
AQRKRISARK

SEQ ID NO: 2776 - protein, 9 aa, Homo sapiens
GAQRKRISA

SEQ ID NO: 2777 - protein, 9 aa, Homo sapiens
HWMENISPF

SEQ ID NO: 2778 - protein, 9 aa, Homo sapiens
LPSQRRNHW

SEQ ID NO: 2779 - protein, 10 aa, Homo sapiens
LPSQRRNHWM

SEQ ID NO: 2780 - protein, 10 aa, Homo sapiens
NISPFRSVGV

SEQ ID NO: 2781 - protein, 9 aa, Homo sapiens
RISARKGSL

SEQ ID NO: 2782 - protein, 10 aa, Homo sapiens
SPFRSVGVSA

SEQ ID NO: 2783 - protein, 10 aa, Homo sapiens
SPSSHWKTPV

SEQ ID NO: 2784 - protein, 10 aa, Homo sapiens
TALRCVFVPV

SEQ ID NO: 2785 - protein, 9 aa, Homo sapiens
VIYWDGTAL

SEQ ID NO: 2786 - protein, 10 aa, Homo sapiens
VIYWDGTALR

SEQ ID NO: 2787 - protein, 10 aa, Homo sapiens
VLGETGAQRK

SEQ ID NO: 2788 - protein, 9 aa, Homo sapiens
HPRPRHGHL

SEQ ID NO: 2789 - protein, 10 aa, Homo sapiens
HPRPRHGHLQ

SEQ ID NO: 2790 - protein, 9 aa, Homo sapiens
RPRHGHLQA

SEQ ID NO: 2791 - protein, 10 aa, Homo sapiens
RPRHGHLQAV

SEQ ID NO: 2792 - protein, 10 aa, Homo sapiens
GSLKTQVQMK

SEQ ID NO: 2793 - protein, 10 aa, Homo sapiens
PPGPCHLLSL

SEQ ID NO: 2794 - protein, 10 aa, Homo sapiens
RTILNNGSLK

SEQ ID NO: 2795 - protein, 9 aa, Homo sapiens
SLKTQVQMK

SEQ ID NO: 2796 - protein, 10 aa, Homo sapiens
SLKTQVQMKL

SEQ ID NO: 2797 - protein, 9 aa, Homo sapiens
TILNNGSLK

SEQ ID NO: 2798 - protein, 10 aa, Homo sapiens
CPPCRPKQWM

SEQ ID NO: 2799 - protein, 10 aa, Homo sapiens
TTFCPPCRPK

SEQ ID NO: 2800 - protein, 10 aa, Homo sapiens
CFANWPRPAL

SEQ ID NO: 2801 - protein, 9 aa, Homo sapiens
FANWPRPAL

SEQ ID NO: 2802 - protein, 9 aa, Homo sapiens
GLIPHPRPA

SEQ ID NO: 2803 - protein, 9 aa, Homo sapiens
HPRPAPASA

SEQ ID NO: 2804 - protein, 10 aa, Homo sapiens
HPRPAPASAP

SEQ ID NO: 2805 - protein, 9 aa, Homo sapiens
IPHPRPAPA

SEQ ID NO: 2806 - protein, 10 aa, Homo sapiens
IPHPRPAPAS

SEQ ID NO: 2807 - protein, 9 aa, Homo sapiens
RPALCSCGL

SEQ ID NO: 2808 - protein, 10 aa, Homo sapiens
RPALCSCGLI

SEQ ID NO: 2809 - protein, 9 aa, Homo sapiens
TPLPSTRCF

SEQ ID NO: 2810 - protein, 9 aa, Homo sapiens
WPRPALCSC

SEQ ID NO: 2811 - protein, 10 aa, Homo sapiens
WPRPALCSCG

SEQ ID NO: 2812 - protein, 10 aa, Homo sapiens
ALRRSGRPPK

SEQ ID NO: 2813 - protein, 9 aa, Homo sapiens
GLVPSLVSK

SEQ ID NO: 2814 - protein, 9 aa, Homo sapiens
KISVETYTV

SEQ ID NO: 2815 - protein, 10 aa, Homo sapiens
LLMVLMSLDL

SEQ ID NO: 2816 - protein, 10 aa, Homo sapiens
LMSLDLDTGL

SEQ ID NO: 2817 - protein, 9 aa, Homo sapiens
LMVLMSLDL

SEQ ID NO: 2818 - protein, 10 aa, Homo sapiens
LVSKCLILRV

SEQ ID NO: 2819 - protein, 9 aa, Homo sapiens
QLLMVLMSL

SEQ ID NO: 2820 - protein, 9 aa, Homo sapiens
RPGAADTGA

SEQ ID NO: 2821 - protein, 10 aa, Homo sapiens
RPGAADTGAH

SEQ ID NO: 2822 - protein, 9 aa, Homo sapiens
SLDLDTGLV

SEQ ID NO: 2823 - protein, 9 aa, Homo sapiens
SLVSKCLIL

SEQ ID NO: 2824 - protein, 10 aa, Homo sapiens
SQLLMVLMSL

SEQ ID NO: 2825 - protein, 9 aa, Homo sapiens
TVSSQLLMV

SEQ ID NO: 2826 - protein, 9 aa, Homo sapiens
TYTVSSQLL

SEQ ID NO: 2827 - protein, 10 aa, Homo sapiens
TYTVSSQLLM

SEQ ID NO: 2828 - protein, 9 aa, Homo sapiens
VLMSLDLDT

SEQ ID NO: 2829 - protein, 9 aa, Homo sapiens
VPSLVSKCL

SEQ ID NO: 2830 - protein, 10 aa, Homo sapiens
VSKCLILRVK

SEQ ID NO: 2831 - protein, 9 aa, Homo sapiens
YTVSSQLLM

SEQ ID NO: 2832 - protein, 10 aa, Homo sapiens
YTVSSQLLMV

SEQ ID NO: 2833 - protein, 9 aa, Homo sapiens
FCQYHTASV

SEQ ID NO: 2834 - protein, 9 aa, Homo sapiens
CPYGSTSTA

SEQ ID NO: 2835 - protein, 10 aa, Homo sapiens
CPYGSTSTAS

SEQ ID NO: 2836 - protein, 10 aa, Homo sapiens
LARAAASTAT

SEQ ID NO: 2837 - protein, 9 aa, Homo sapiens
MLTDSLFLP

SEQ ID NO: 2838 - protein, 10 aa, Homo sapiens
PPRSSSAIAV

SEQ ID NO: 2839 - protein, 10 aa, Homo sapiens
RAAASTATEV

SEQ ID NO: 2840 - protein, 9 aa, Homo sapiens
SPPRSSSAI

SEQ ID NO: 2841 - protein, 10 aa, Homo sapiens
SPPRSSSAIA

SEQ ID NO: 2842 - protein, 9 aa, Homo sapiens
SPTQRCRLA

SEQ ID NO: 2843 - protein, 9 aa, Homo sapiens
TQRCRLARA

SEQ ID NO: 2844 - protein, 10 aa, Homo sapiens
TQRCRLARAA

SEQ ID NO: 2845 - protein, 10 aa, Homo sapiens
KIWKTTQMCR

SEQ ID NO: 2846 - protein, 9 aa, Homo sapiens
WTSSGRSTK

SEQ ID NO: 2847 - protein, 9 aa, Homo sapiens
ALGELARAL

SEQ ID NO: 2848 - protein, 9 aa, Homo sapiens
AQLRRRAAA

SEQ ID NO: 2849 - protein, 10 aa, Homo sapiens
AQLRRRAAAL

SEQ ID NO: 2850 - protein, 10 aa, Homo sapiens
ARRAARMAQL

SEQ ID NO: 2851 - protein, 9 aa, Homo sapiens
HPQLPRSPL

SEQ ID NO: 2852 - protein, 10 aa, Homo sapiens
HPQLPRSPLA

SEQ ID NO: 2853 - protein, 9 aa, Homo sapiens
LARALPGHL

SEQ ID NO: 2854 - protein, 10 aa, Homo sapiens
LARALPGHLL

SEQ ID NO: 2855 - protein, 9 aa, Homo sapiens
MAQLRRRAA

SEQ ID NO: 2856 - protein, 10 aa, Homo sapiens
MAQLRRRAAA

SEQ ID NO: 2857 - protein, 9 aa, Homo sapiens
QLRRRAAAL

SEQ ID NO: 2858 - protein, 10 aa, Homo sapiens
RAAALPNAAA

SEQ ID NO: 2859 - protein, 10 aa, Homo sapiens
RMAQLRRRAA

SEQ ID NO: 2860 - protein, 10 aa, Homo sapiens
SQSARRAARM

SEQ ID NO: 2861 - protein, 10 aa, Homo sapiens
GMTLGEKFRV

SEQ ID NO: 2862 - protein, 9 aa, Homo sapiens
RVGNCKHLK

SEQ ID NO: 2863 - protein, 9 aa, Homo sapiens
GPSEPGNNI

SEQ ID NO: 2864 - protein, 10 aa, Homo sapiens
KICNESASRK

SEQ ID NO: 2865 - protein, 10 aa, Homo sapiens
GIQVLNVSLK

SEQ ID NO: 2866 - protein, 9 aa, Homo sapiens
IQVLNVSLK

SEQ ID NO: 2867 - protein, 9 aa, Homo sapiens
KSSSNVISY

SEQ ID NO: 2868 - protein, 9 aa, Homo sapiens
KYGWSLLRV

SEQ ID NO: 2869 - protein, 9 aa, Homo sapiens
RSWKYGWSL

SEQ ID NO: 2870 - protein, 9 aa, Homo sapiens
SLKSSSNVI

SEQ ID NO: 2871 - protein, 9 aa, Homo sapiens
SWKYGWSLL

SEQ ID NO: 2872 - protein, 9 aa, Homo sapiens
TVANGRSWK

SEQ ID NO: 2873 - protein, 9 aa, Homo sapiens
VPQVNGIQV

SEQ ID NO: 2874 - protein, 10 aa, Homo sapiens
VPQVNGIQVL

SEQ ID NO: 2875 - protein, 10 aa, Homo sapiens
VTVANGRSWK

SEQ ID NO: 2876 - protein, 9 aa, Homo sapiens
WSLLRVPQV

SEQ ID NO: 2877 - protein, 10 aa, Homo sapiens
HPGDCLIFKL

SEQ ID NO: 2878 - protein, 9 aa, Homo sapiens
KLRVPGSSV

SEQ ID NO: 2879 - protein, 10 aa, Homo sapiens
KLRVPGSSVL

SEQ ID NO: 2880 - protein, 9 aa, Homo sapiens
RVPGSSVLV

SEQ ID NO: 2881 - protein, 9 aa, Homo sapiens
SVLVTVPGL

SEQ ID NO: 2882 - protein, 10 aa, Homo sapiens
VPGSSVLVTV

SEQ ID NO: 2883 - protein, 10 aa, Homo sapiens
ALLLRPRPPR

SEQ ID NO: 2884 - protein, 10 aa, Homo sapiens
ALSALLLRPR

SEQ ID NO: 2885 - protein, 9 aa, Homo sapiens
LTINKEEAL

SEQ ID NO: 2886 - protein, 9 aa, Homo sapiens
IVHSATGFK

SEQ ID NO: 2887 - protein, 9 aa, Homo sapiens
ATGFKQSSK

SEQ ID NO: 2888 - protein, 9 aa, Homo sapiens
ELFPLIFPA

SEQ ID NO: 2889 - protein, 9 aa, Homo sapiens
KGPELFPLI

SEQ ID NO: 2890 - protein, 10 aa, Homo sapiens
KGPELFPLIF

SEQ ID NO: 2891 - protein, 11 aa, Homo sapiens
KPTDAPPKAGV

SEQ ID NO: 2892 - protein, 10 aa, Homo sapiens
QVYRRKHQEL

SEQ ID NO: 2893 - protein, 9 aa, Homo sapiens
STREKNSQV

SEQ ID NO: 2894 - protein, 9 aa, Homo sapiens
VYRRKHQEL

SEQ ID NO: 2895 - protein, 9 aa, Homo sapiens
VLTVTSTDV

SEQ ID NO: 2896 - protein, 10 aa, Homo sapiens
VLTVTSTDVK

SEQ ID NO: 2897 - protein, 9 aa, Homo sapiens
IMSLWGLVS

SEQ ID NO: 2898 - protein, 10 aa, Homo sapiens
IMSLWGLVSK

SEQ ID NO: 2899 - protein, 9 aa, Homo sapiens
KLKQEATSK

SEQ ID NO: 2900 - protein, 9 aa, Homo sapiens
QIMSLWGLV

SEQ ID NO: 2901 - protein, 9 aa, Homo sapiens
SQIMSLWGL

SEQ ID NO: 2902 - protein, 10 aa, Homo sapiens
SQIMSLWGLV

SEQ ID NO: 2903 - protein, 9 aa, Homo sapiens
TSKSQIMSL

SEQ ID NO: 2904 - protein, 10 aa, Homo sapiens
LLQEFDVQEA

SEQ ID NO: 2905 - protein, 10 aa, Homo sapiens
LQEFDVQEAL

SEQ ID NO: 2906 - protein, 9 aa, Homo sapiens
GPREPRNRT

SEQ ID NO: 2907 - protein, 10 aa, Homo sapiens
RNRTEKHSTM

SEQ ID NO: 2908 - protein, 9 aa, Homo sapiens
ALNSEALSV

SEQ ID NO: 2909 - protein, 10 aa, Homo sapiens
ALNSEALSVV

SEQ ID NO: 2910 - protein, 10 aa, Homo sapiens
MALNSEALSV

SEQ ID NO: 2911 - protein, 9 aa, Homo sapiens
SLLNYLREM

SEQ ID NO: 2912 - protein, 9 aa, Homo sapiens
EYMANGSLL

SEQ ID NO: 2913 - protein, 9 aa, Homo sapiens
TEYMANGSL

SEQ ID NO: 2914 - protein, 9 aa, Homo sapiens
MANGSLLNY

SEQ ID NO: 2915 - protein, 10 aa, Homo sapiens
YMANGSLLNY

SEQ ID NO: 2916 - protein, 8 aa, Homo sapiens
ANGSLLNY

SEQ ID NO: 2917 - protein, 9 aa, Homo sapiens
ANGSLLNYL

SEQ ID NO: 2918 - protein, 10 aa, Homo sapiens
ANGSLLNYLR

SEQ ID NO: 2919 - protein, 8 aa, Homo sapiens
EYMANGSL

SEQ ID NO: 2920 - protein, 9 aa, Homo sapiens
EYMANGSLL

SEQ ID NO: 2921 - protein, 10 aa, Homo sapiens
EYMANGSLLN

SEQ ID NO: 2922 - protein, 11 aa, Homo sapiens
EYMANGSLLNY

SEQ ID NO: 2923 - protein, 8 aa, Homo sapiens
GSLLNYLR

SEQ ID NO: 2924 - protein, 10 aa, Homo sapiens
GSLLNYLREM

SEQ ID NO: 2925 - protein, 9 aa, Homo sapiens
ITEYMANGS

SEQ ID NO: 2926 - protein, 10 aa, Homo sapiens
ITEYMANGSL

SEQ ID NO: 2927 - protein, 11 aa, Homo sapiens
ITEYMANGSLL

SEQ ID NO: 2928 - protein, 9 aa, Homo sapiens
MANGSLLNY

SEQ ID NO: 2929 - protein, 10 aa, Homo sapiens
MANGSLLNYL

SEQ ID NO: 2930 - protein, 11 aa, Homo sapiens
MANGSLLNYLR

SEQ ID NO: 2931 - protein, 8 aa, Homo sapiens
NGSLLNYL

SEQ ID NO: 2932 - protein, 9 aa, Homo sapiens
NGSLLNYLR

SEQ ID NO: 2933 - protein, 9 aa, Homo sapiens
SLLNYLREM

SEQ ID NO: 2934 - protein, 10 aa, Homo sapiens
SLLNYLREMR

SEQ ID NO: 2935 - protein, 9 aa, Homo sapiens
TEYMANGSL

SEQ ID NO: 2936 - protein, 10 aa, Homo sapiens
TEYMANGSLL

SEQ ID NO: 2937 - protein, 12 aa, Homo sapiens
TEYMANGSLLNY

SEQ ID NO: 2938 - protein, 8 aa, Homo sapiens
YMANGSLL

SEQ ID NO: 2939 - protein, 9 aa, Homo sapiens
YMANGSLLN

SEQ ID NO: 2940 - protein, 10 aa, Homo sapiens
YMANGSLLNY

SEQ ID NO: 2941 - protein, 51 aa, Homo sapiens
CTGRGPDNCIQCAHYIDGPRCVRTCSAGVMGENNTLVWKYADAGHVCHLCH

SEQ ID NO: 2942 - protein, 51 aa, Homo sapiens
CTGRCPDNCIQCAHYIDGPHCVKTCLAGVMGENNTLVWKYADAGHVCHLCH

SEQ ID NO: 2943 - protein, 51 aa, Homo sapiens
GRGPDNCIQCAHYIDGPHCVKTCPAAVMGENNTLVWKYADAGHVCHLCHPN

SEQ ID NO: 2944 - protein, 51 aa, Homo sapiens
GRGPDNCIQCAHYIDGPHCVKTCPAVVMGENNTLVWKYADAGHVCHLCHPN

SEQ ID NO: 2945 - protein, 50 aa, Homo sapiens
KLTQLGTFEDHFLSLQRMFNNCLVVRGNLEITYVQRNYDLSFLKTQEVAG

SEQ ID NO: 2946 - protein, 50 aa, Homo sapiens
QERELVEPLTPSGEAPNQALLRILKKTEFKKIKVLGSGAFGTVYKGLWIP

SEQ ID NO: 2947 - protein, 51 aa, Homo sapiens
PSGEAPNQALLRILKETEFKKIKVLASGAFGTVYKGLWIPEGEKVKIPVAI

SEQ ID NO: 2948 - protein, 65 aa, Homo sapiens
GAFGTVYKGLWIPEGEKVKIPVAIKTSPKANKEILDEAYVMASVDNPHVCRLLGICLTSTVQLIT

SEQ ID NO: 2949 - protein, 52 aa, Homo sapiens
AIKELREQATSPKANKEILDEAYVMAIVDNPHVCRLLGICLTSTVQLITQLM

SEQ ID NO: 2950 - protein, 52 aa, Homo sapiens
YLLNVVCVQLAKGMNYLEDRRLVHRDMAARNVLVKTPQHVKITDFGLAKLLG

SEQ ID NO: 2951 - protein, 51 aa, Homo sapiens
LVHRDLAARNVLVKTPQHIVKITDEGRAKLGAEEKEYHAFGGRVPIKWMAL

SEQ ID NO: 2952 - protein, 50 aa, Homo sapiens
RDLAARNVLVKTPQHVRITDFGLAKQLGAEEKEYHAEGGKVPIKWMALES

SEQ ID NO: 2953 - protein, 51 aa, Homo sapiens
QEVAGYVLIALNTVERIPLENLQAIEKGNMYYENSYALVLSNYDANKTGLK

SEQ ID NO: 2954 - protein, 51 aa, Homo sapiens
SPSDECLMNQCAAGEIGPNESDLVCCKFRDEATCKDTCPPLMLYNPTTYQM

SEQ ID NO: 2955 - protein, 51 aa, Homo sapiens
CPPLMLYNPTTYQMDVNPEGKYSFGTTCVKKCPRNYVVTDHGSCVRACGAD

SEQ ID NO: 2956 - protein, 51 aa, Homo sapiens
CPPLMLYNPTTYQMDVNPEGKYSFGDTCVKKCPRNYVVTDHGSCVRACGAD

SEQ ID NO: 2957 - protein, 51 aa, Homo sapiens
CPPLMLYNPTTYQMDVNPEGKYSFGVTCVKKCPRNYVVTDHGSCVRACGAD

SEQ ID NO: 2958 - protein, 52 aa, Homo sapiens
VNPEGKYSFGATCVKKICPRNYVVTDYGSCVRACGADSYEMEEDGVRKCKKC

SEQ ID NO: 2959 - protein, 9 aa, Homo sapiens
CVKTCSAGV

SEQ ID NO: 2960 - protein, 9 aa, Homo sapiens
VKTCSAGVM

SEQ ID NO: 2961 - protein, 10 aa, Homo sapiens
CVKTCSAGVM

SEQ ID NO: 2962 - protein, 9 aa, Homo sapiens
CVKTCLAGV

SEQ ID NO: 2963 - protein, 9 aa, Homo sapiens
GPHCVKTCL

SEQ ID NO: 2964 - protein, 9 aa, Homo sapiens
VKTCLAGVM

SEQ ID NO: 2965 - protein, 9 aa, Homo sapiens
CVKTCPAAV

SEQ ID NO: 2966 - protein, 9 aa, Homo sapiens
VKTCPAAVM

SEQ ID NO: 2967 - protein, 9 aa, Homo sapiens
AVMGENNTL

SEQ ID NO: 2968 - protein, 10 aa, Homo sapiens
AVMGENNTLV

SEQ ID NO: 2969 - protein, 10 aa, Homo sapiens
CVKTCPAAVM

SEQ ID NO: 2970 - protein, 10 aa, Homo sapiens
AAVMGENNTL

SEQ ID NO: 2971 - protein, 8 aa, Homo sapiens
CVKCPAVV

SEQ ID NO: 2972 - protein, 9 aa, Homo sapiens
VKTCPAVVM

SEQ ID NO: 2973 - protein, 10 aa, Homo sapiens
VVMGENNTLV

SEQ ID NO: 2974 - protein, 10 aa, Homo sapiens
CVKTCPAVVM

SEQ ID NO: 2975 - protein, 9 aa, Homo sapiens
MFNNCEVVR

SEQ ID NO: 2976 - protein, 9 aa, Homo sapiens
EVVRGNLEI

SEQ ID NO: 2977 - protein, 9 aa, Homo sapiens
VRGNLETTY

SEQ ID NO: 2978 - protein, 10 aa, Homo sapiens
RMFNNCEVVR

SEQ ID NO: 2979 - protein, 10 aa, Homo sapiens
VVRGNLEITY

SEQ ID NO: 2980 - protein, 9 aa, Homo sapiens
CEVVRGNIE

SEQ ID NO: 2981 - protein, 9 aa, Homo sapiens
RILKKTEFK

SEQ ID NO: 2982 - protein, 9 aa, Homo sapiens
ILKKTEFKK

SEQ ID NO: 2983 - protein, 9 aa, Homo sapiens
QALLRILKK

SEQ ID NO: 2984 - protein, 8 aa, Homo sapiens
LRILKTEF

SEQ ID NO: 2985 - protein, 10 aa, Homo sapiens
RILKKTEFKK

SEQ ID NO: 2986 - protein, 10 aa, Homo sapiens
NQALLRILKK

SEQ ID NO: 2987 - protein, 9 aa, Homo sapiens
LLRLKKTEF

SEQ ID NO: 2988 - protein, 9 aa, Homo sapiens
ASGAFGTVY

SEQ ID NO: 2989 - protein, 9 aa, Homo sapiens
VLASGAFGT

SEQ ID NO: 2990 - protein, 8 aa, Homo sapiens
LASAFGTY

SEQ ID NO: 2991 - protein, 9 aa, Homo sapiens
KIKVLASGA

SEQ ID NO: 2992 - protein, 9 aa, Homo sapiens
KVLASGAFG

SEQ ID NO: 2993 - protein, 9 aa, Homo sapiens
IKVLASGAF

SEQ ID NO: 2994 - protein, 9 aa, Homo sapiens
KKIKVLASG

SEQ ID NO: 2995 - protein, 5 aa, Homo sapiens
VLASG

SEQ ID NO: 2996 - protein, 10 aa, Homo sapiens
VLASGAFGTV

SEQ ID NO: 2997 - protein, 10 aa, Homo sapiens
ASGAFGTVYK

SEQ ID NO: 2998 - protein, 10 aa, Homo sapiens
KIKVLASGAF

SEQ ID NO: 2999 - protein, 10 aa, Homo sapiens
LASGAFGTVY

SEQ ID NO: 3000 - protein, 10 aa, Homo sapiens
KKIKVLASGA

SEQ ID NO: 3001 - protein, 10 aa, Homo sapiens
TEFKKIKVIA

SEQ ID NO: 3002 - protein, 10 aa, Homo sapiens
AIKTSPKANK

SEQ ID NO: 3003 - protein, 10 aa, Homo sapiens
KVKIPVAIKT

SEQ ID NO: 3004 - protein, 10 aa, Homo sapiens
KTSPKANKEI

SEQ ID NO: 3005 - protein, 9 aa, Homo sapiens
MAIVDNPHV

SEQ ID NO: 3006 - protein, 9 aa, Homo sapiens
VMAIVDNPH

SEQ ID NO: 3007 - protein, 9 aa, Homo sapiens
DEAYVMAIV

SEQ ID NO: 3008 - protein, 9 aa, Homo sapiens
LDEAYYMAI

SEQ ID NO: 3009 - protein, 9 aa, Homo sapiens
RDEAYVMAI

SEQ ID NO: 3010 - protein, 10 aa, Homo sapiens
VMAIVDNPHV

SEQ ID NO: 3011 - protein, 10 aa, Homo sapiens
AIVDNPHVCR

SEQ ID NO: 3012 - protein, 10 aa, Homo sapiens
YVMAIVDNPH

SEQ ID NO: 3013 - protein, 10 aa, Homo sapiens
DEAYVMAIVD

SEQ ID NO: 3014 - protein, 9 aa, Homo sapiens
RLVHRDMAA

SEQ ID NO: 3015 - protein, 9 aa, Homo sapiens
DMAARNVLV

SEQ ID NO: 3016 - protein, 9 aa, Homo sapiens
MAARNVLVK

SEQ ID NO: 3017 - protein, 9 aa, Homo sapiens
LVHRDMARR

SEQ ID NO: 3018 - protein, 9 aa, Homo sapiens
RDMAARNVL

SEQ ID NO: 3019 - protein, 10 aa, Homo sapiens
RLVHRDMAAR

SEQ ID NO: 3020 - protein, 10 aa, Homo sapiens
DMAARNVLVK

SEQ ID NO: 3021 - protein, 10 aa, Homo sapiens
HRDMAARNVL

SEQ ID NO: 3022 - protein, 10 aa, Homo sapiens
RDMAARNVLV

SEQ ID NO: 3023 - protein, 8 aa, Homo sapiens
KITDGRAK

SEQ ID NO: 3024 - protein, 9 aa, Homo sapiens
HVKITDFGR

SEQ ID NO: 3025 - protein, 9 aa, Homo sapiens
FGRAKLLGA

SEQ ID NO: 3026 - protein, 10 aa, Homo sapiens
HVKITDFGRA

SEQ ID NO: 3027 - protein, 10 aa, Homo sapiens
RAKLIGAEEK

SEQ ID NO: 3028 - protein, 10 aa, Homo sapiens
LAKQLGAEEK

SEQ ID NO: 3029 - protein, 10 aa, Homo sapiens
KQLGAEEKEY

SEQ ID NO: 3030 - protein, 8 aa, Homo sapiens
QHKGNMYY

SEQ ID NO: 3031 - protein, 8 aa, Homo sapiens
LQHKGNMY

SEQ ID NO: 3032 - protein, 9 aa, Homo sapiens
LQHKGNMYY

SEQ ID NO: 3033 - protein, 10 aa, Homo sapiens
KGNMYYENSY

SEQ ID NO: 3034 - protein, 9 aa, Homo sapiens
RESDCLVCC

SEQ ID NO: 3035 - protein, 9 aa, Homo sapiens
YSFGTTCVK

SEQ ID NO: 3036 - protein, 9 aa, Homo sapiens
TTCVKKCPR

SEQ ID NO: 3037 - protein, 9 aa, Homo sapiens
GKYSFGTTC

SEQ ID NO: 3038 - protein, 10 aa, Homo sapiens
YSFGTTCVKK

SEQ ID NO: 3039 - protein, 10 aa, Homo sapiens
KYSFGTTCVK

SEQ ID NO: 3040 - protein, 10 aa, Homo sapiens
GTTCVKKCPR

SEQ ID NO: 3041 - protein, 10 aa, Homo sapiens
GKYSFGTTCV

SEQ ID NO: 3042 - protein, 9 aa, Homo sapiens
YSFGDTCVK

SEQ ID NO: 3043 - protein, 9 aa, Homo sapiens
DTCVKKCPR

SEQ ID NO: 3044 - protein, 9 aa, Homo sapiens
GKYSFGDTC

SEQ ID NO: 3045 - protein, 10 aa, Homo sapiens
YSFGDTCVKK

SEQ ID NO: 3046 - protein, 9 aa, Homo sapiens
KYSFGTCVK

SEQ ID NO: 3047 - protein, 10 aa, Homo sapiens
GKYSFGDTCV

SEQ ID NO: 3048 - protein, 9 aa, Homo sapiens
YSFGVTCVK

SEQ ID NO: 3049 - protein, 9 aa, Homo sapiens
KYSFGVTCV

SEQ ID NO: 3050 - protein, 9 aa, Homo sapiens
VTCVKKCPR

SEQ ID NO: 3051 - protein, 9 aa, Homo sapiens
GKYSFGVTC

SEQ ID NO: 3052 - protein, 10 aa, Homo sapiens
YSFGVTCVKK

SEQ ID NO: 3053 - protein, 10 aa, Homo sapiens
KYSFGVTCVK

SEQ ID NO: 3054 - protein, 10 aa, Homo sapiens
GVTCVKKCPR

SEQ ID NO: 3055 - protein, 10 aa, Homo sapiens
GKYSFGVTCV

SEQ ID NO: 3056 - protein, 9 aa, Homo sapiens
VVTDYGSCV

SEQ ID NO: 3057 - protein, 10 aa, Homo sapiens
YVVTDYGSCV

SEQ ID NO: 3058 - protein, 10 aa, Homo sapiens
VVTDYGSCVR

SEQ ID NO: 3059 - protein, 10 aa, Homo sapiens
CPRNYVVTDY

SEQ ID NO: 3060 - protein, 9 aa, Homo sapiens
FGRAKLLGA

SEQ ID NO: 3061 - protein, 9 aa, Homo sapiens
KITDFGRAK

SEQ ID NO: 3062 - protein, 23 aa, Homo sapiens
GICLTSTVQLIMQLMPFGCLLDY

SEQ ID NO: 3063 - protein, 101 aa, Homo sapiens
SLNITSLGLRSLKEISDGDVIISGNKNLCYANTINWKKLFGTSGQKTKIIRNRGENSCKATGQVCHALCSPEGCWGPEPRDCVSCRNVSRGRECVDKCNLL

SEQ ID NO: 3064 - protein, 10 aa, Homo sapiens
VQLIMQLMPF

SEQ ID NO: 3065 - protein, 10 aa, Homo sapiens
STVQLIMQLM

SEQ ID NO: 3066 - protein, 9 aa, Homo sapiens
QLIMQLMPF

SEQ ID NO: 3067 - protein, 10 aa, Homo sapiens
MQLMPFGCLL

SEQ ID NO: 3068 - protein, 8 aa, Homo sapiens
LIMQLMPF

SEQ ID NO: 3069 - protein, 9 aa, Homo sapiens
LTSTVQLIM

SEQ ID NO: 3070 - protein, 9 aa, Homo sapiens
STVQLIMQL

SEQ ID NO: 3071 - protein, 10 aa, Homo sapiens
TSTVQLIMQL

SEQ ID NO: 3072 - protein, 8 aa, Homo sapiens
TVQLIMQL

SEQ ID NO: 3073 - protein, 9 aa, Homo sapiens
TVQLIMQLM

SEQ ID NO: 3074 - protein, 8 aa, Homo sapiens
VQLIMQLM

SEQ ID NO: 3075 - protein, 10 aa, Homo sapiens
CLTSTVQLIM

SEQ ID NO: 3076 - protein, 9 aa, Homo sapiens
IMQLMPFGC

SEQ ID NO: 3077 - protein, 10 aa, Homo sapiens
IMQLMPFGCL

SEQ ID NO: 3078 - protein, 9 aa, Homo sapiens
LIMQLMPFG

SEQ ID NO: 3079 - protein, 10 aa, Homo sapiens
LIMQLMPFGC

SEQ ID NO: 3080 - protein, 10 aa, Homo sapiens
QLIMQLMPFG

SEQ ID NO: 3081 - protein, 11 aa, Homo sapiens
IIRNRGENSCK

SEQ ID NO: 3082 - protein, 80 aa, Homo sapiens
MRPSGTAGAALLALLAALCPASRALEEKKGNYVVTDHGSCVRACGADSYEMEEDGVRKCKKCEGPCRKVCNGIGIGEFKD

SEQ ID NO: 3083 - protein, 100 aa, Homo sapiens
LPQPPICTIDVYMIMVKCWMIDADSRPKFRELIIEFSKMARDPQRYLVIQLQDKFEHLKMIQQEEIRKLEEEKKQLEGEIIDFYKMKAASEALQTQLSTD

SEQ ID NO: 3084 - protein, 10 aa, Homo sapiens
ALEEKKGNYV

SEQ ID NO: 3085 - protein, 10 aa, Homo sapiens
IQLQDKFEHL

SEQ ID NO: 3086 - protein, 9 aa, Homo sapiens
QLQDKFEHL

SEQ ID NO: 3087 - protein, 10 aa, Homo sapiens
QLQDKFEHLK

SEQ ID NO: 3088 - protein, 10 aa, Homo sapiens
YLVIQLQDKF

SEQ ID NO: 3089 - protein, 101 aa, Homo sapiens; identical to SEQ ID NO: 1978

SEQ ID NO: 3090 - protein, 8 aa, Homo sapiens
ANGSLLNY

SEQ ID NO: 3091 - protein, 9 aa, Homo sapiens
ANGSLLNYL

SEQ ID NO: 3092 - protein, 10 aa, Homo sapiens
ANGSLLNYLR

SEQ ID NO: 3093 - protein, 8 aa, Homo sapiens
EYMANGSL

SEQ ID NO: 3094 - protein, 10 aa, Homo sapiens
EYMANGSLLN

SEQ ID NO: 3095 - protein, 11 aa, Homo sapiens
EYMANGSLLNY

SEQ ID NO: 3096 - protein, 8 aa, Homo sapiens
GSLLNYLR

SEQ ID NO: 3097 - protein, 10 aa, Homo sapiens
GSLLNYLREM

SEQ ID NO: 3098 - protein, 9 aa, Homo sapiens
ITEYMANGS

SEQ ID NO: 3099 - protein, 10 aa, Homo sapiens
ITEYMANGSL

SEQ ID NO: 3100 - protein, 11 aa, Homo sapiens
ITEYMANGSLL

SEQ ID NO: 3101 - protein, 10 aa, Homo sapiens
MANGSLLNYL

SEQ ID NO: 3102 - protein, 11 aa, Homo sapiens
MANGSLLNYLR

SEQ ID NO: 3103 - protein, 8 aa, Homo sapiens
NGSLLNYL

SEQ ID NO: 3104 - protein, 8 aa, Homo sapiens
NGSLLNYL

SEQ ID NO: 3105 - protein, 10 aa, Homo sapiens
SLLNYLREMR

SEQ ID NO: 3106 - protein, 10 aa, Homo sapiens
TEYMANGSLL

SEQ ID NO: 3107 - protein, 12 aa, Homo sapiens
TEYMANGSLLNY

SEQ ID NO: 3108 - protein, 8 aa, Homo sapiens
YMANGSLL

SEQ ID NO: 3109 - protein, 23 aa, Homo sapiens
GICLTSTVQLIMQLMPFGCLLDY

SEQ ID NO: 3110 - protein, 10 aa, Homo sapiens
VQLIMQLMPF

SEQ ID NO: 3111 - protein, 10 aa, Homo sapiens
STVQLIMQLM

SEQ ID NO: 3112 - protein, 9 aa, Homo sapiens
QLIMQLMPF

SEQ ID NO: 3113 - protein, 10 aa, Homo sapiens
MQLMPFGCLL

SEQ ID NO: 3114 - protein, 8 aa, Homo sapiens
LIMQLMPF

SEQ ID NO: 3115 - protein, 9 aa, Homo sapiens
LTSTVQLIM

SEQ ID NO: 3116 - protein, 9 aa, Homo sapiens
STVQLIMQL

SEQ ID NO: 3117 - protein, 10 aa, Homo sapiens
TSTVQLIMQL

SEQ ID NO: 3118 - protein, 8 aa, Homo sapiens
TVQLIMQL

SEQ ID NO: 3119 - protein, 9 aa, Homo sapiens
TVQLIMQLM

SEQ ID NO: 3120 - protein, 8 aa, Homo sapiens
VQLIMQLM

SEQ ID NO: 3121 - protein, 10 aa, Homo sapiens
CLTSTVQLIM

SEQ ID NO: 3122 - protein, 9 aa, Homo sapiens
IMQLMPFGC

SEQ ID NO: 3123 - protein, 9 aa, Homo sapiens
IMQLMPFGC

SEQ ID NO: 3124 - protein, 10 aa, Homo sapiens
IMQLMPFGCL

SEQ ID NO: 3125 - protein, 9 aa, Homo sapiens
LIMQLMPFG

SEQ ID NO: 3126 - protein, 10 aa, Homo sapiens
LIMQLMPFGC

SEQ ID NO: 3127 - protein, 10 aa, Homo sapiens
QLIMQLMPFG

SEQ ID NO: 3128 - protein, 101 aa, Homo sapiens; identical to SEQ ID NO: 3063

SEQ ID NO: 3129 - protein, 11 aa, Homo sapiens
IIRNRGENSCK

SEQ ID NO: 3130 - protein, 80 aa, Homo sapiens; identical to SEQ ID NO: 3082

SEQ ID NO: 3131 - protein, 10 aa, Homo sapiens
ALEEKKGNYV

SEQ ID NO: 3132 - protein, 100 aa, Homo sapiens; identical to SEQ ID NO: 3083

SEQ ID NO: 3133 - protein, 10 aa, Homo sapiens
IQLQDKFEHL

SEQ ID NO: 3134 - protein, 100 aa, Homo sapiens; identical to SEQ ID NO: 3083

SEQ ID NO: 3135 - protein, 9 aa, Homo sapiens
QLQDKFEHL

SEQ ID NO: 3136 - protein, 100 aa, Homo sapiens; identical to SEQ ID NO: 3083

SEQ ID NO: 3137 - protein, 10 aa, Homo sapiens
QLQDKFEHLK

SEQ ID NO: 3138 - protein, 100 aa, Homo sapiens; identical to SEQ ID NO: 3083

SEQ ID NO: 3139 - protein, 9 aa, Homo sapiens
STVQLIMQL

SEQ ID NO: 3140 - protein, 8 aa, Homo sapiens
LIMQLMPF

SEQ ID NO: 3141 - protein, 9 aa, Homo sapiens
LTSTVQLIM

SEQ ID NO: 3142 - protein, 8 aa, Homo sapiens
TVQLIMQL

SEQ ID NO: 3143 - protein, 10 aa, Homo sapiens
TSTVQLIMQL

SEQ ID NO: 3144 - protein, 9 aa, Homo sapiens
TVQLIMQLM

SEQ ID NO: 3145 - protein, 8 aa, Homo sapiens
VQLIMQLM

SEQ ID NO: 3146 - protein, 9 aa, Homo sapiens
STVQLIMQL

SEQ ID NO: 3147 - protein, 8 aa, Homo sapiens
LIMQLMPF

SEQ ID NO: 3148 - protein, 9 aa, Homo sapiens
LTSTVQLIM

SEQ ID NO: 3149 - protein, 8 aa, Homo sapiens
TVQLIMQL

SEQ ID NO: 3150 - protein, 10 aa, Homo sapiens
TSTVQLIMQL

SEQ ID NO: 3151 - protein, 9 aa, Homo sapiens
TVQLIMQLM

SEQ ID NO: 3152 - protein, 8 aa, Homo sapiens
VQLIMQLM

SEQ ID NO: 3153 - protein, 101 aa, Homo sapiens; identical to SEQ ID NO: 3063

SEQ ID NO: 3154 - protein, 11 aa, Homo sapiens
IIRNRGENSCK

SEQ ID NO: 3155 - protein, 101 aa, Homo sapiens
IPVAIKELREATSPKANKEILDEAYVMASVDNPHVCRLLGICLTSTVQLIMQLMPFGCLLDYVREHKDNIGSQYLLNWCVQIAKGMNYLEDRRLVHRDLAA

SEQ ID NO: 3156 - protein, 10 aa, Homo sapiens
CLTSTVQLIM

SEQ ID NO: 3157 - protein, 9 aa, Homo sapiens
IMQLMPFGC

SEQ ID NO: 3158 - protein, 10 aa, Homo sapiens
IMQLMPFGCL

SEQ ID NO: 3159 - protein, 9 aa, Homo sapiens
LIMQLMPFG

SEQ ID NO: 3160 - protein, 10 aa, Homo sapiens
LIMQLMPFGC

SEQ ID NO: 3161 - protein, 9 aa, Homo sapiens
LTSTVQLIM

SEQ ID NO: 3162 - protein, 9 aa, Homo sapiens
MQLMPFGCL

SEQ ID NO: 3163 - protein, 10 aa, Homo sapiens
MQLMPFGCLL

SEQ ID NO: 3164 - protein, 10 aa, Homo sapiens
VQLIMQLMPF

SEQ ID NO: 3165 - protein, 8 aa, Homo sapiens
LIMQLMPF

SEQ ID NO: 3166 - protein, 9 aa, Homo sapiens
LTSTVQLIM

SEQ ID NO: 3167 - protein, 9 aa, Homo sapiens
QLIMQLMPF

SEQ ID NO: 3168 - protein, 9 aa, Homo sapiens
STVQLIMQL

SEQ ID NO: 3169 - protein, 10 aa, Homo sapiens
STVQLIMQLM

SEQ ID NO: 3170 - protein, 10 aa, Homo sapiens
TSTVQLIMQL

SEQ ID NO: 3171 - protein, 8 aa, Homo sapiens
TVQLIMQL

SEQ ID NO: 3172 - protein, 9 aa, Homo sapiens
TVQLIMQLM

SEQ ID NO: 3173 - protein, 8 aa, Homo sapiens
VQLIMQLM

SEQ ID NO: 3174 - protein, 80 aa, Homo sapiens; identical to SEQ ID NO: 3082

SEQ ID NO: 3175 - protein, 100 aa, Homo sapiens; identical to SEQ ID NO: 3083

SEQ ID NO: 3176 - protein, 10 aa, Homo sapiens
ALEEKKGNYV

SEQ ID NO: 3177 - protein, 10 aa, Homo sapiens
IQLQDKFEHL

SEQ ID NO: 3178 - protein, 9 aa, Homo sapiens
QLQDKFEHL

SEQ ID NO: 3179 - protein, 10 aa, Homo sapiens
QLQDKFEHLK

SEQ ID NO: 3180 - protein, 10 aa, Homo sapiens
YLVIQLQDKF

SEQ ID NO: 3181 - protein, 10 aa, Homo sapiens
VQLIMQLMPF

SEQ ID NO: 3182 - protein, 10 aa, Homo sapiens
STVQLIMQLM

SEQ ID NO: 3183 - protein, 9 aa, Homo sapiens
QLIMQLMPF

SEQ ID NO: 3184 - protein, 10 aa, Homo sapiens
MQLMPFGCLL

SEQ ID NO: 3185 - protein, 8 aa, Homo sapiens
LIMQLMPF

SEQ ID NO: 3186 - protein, 9 aa, Homo sapiens
LTSTVQLIM

SEQ ID NO: 3187 - protein, 9 aa, Homo sapiens
STVQLIMQL

SEQ ID NO: 3188 - protein, 10 aa, Homo sapiens
TSTVQLIMQL

SEQ ID NO: 3189 - protein, 8 aa, Homo sapiens
TVQLIMQL

SEQ ID NO: 3190 - protein, 9 aa, Homo sapiens
TVQLIMQLM

SEQ ID NO: 3191 - protein, 8 aa, Homo sapiens
VQLIMQLM

SEQ ID NO: 3192 - protein, 10 aa, Homo sapiens
CLTSTVQLIM

SEQ ID NO: 3193 - protein, 9 aa, Homo sapiens
IMQLMPFGC

SEQ ID NO: 3194 - protein, 9 aa, Homo sapiens
IMQLMPFGC

SEQ ID NO: 3195 - protein, 10 aa, Homo sapiens
IMQLMPFGCL

SEQ ID NO: 3196 - protein, 9 aa, Homo sapiens
LIMQLMPFG

SEQ ID NO: 3197 - protein, 10 aa, Homo sapiens
LIMQLMPFGC

SEQ ID NO: 3198 - protein, 10 aa, Homo sapiens
QLIMQLMPFG

SEQ ID NO: 3199 - protein, 11 aa, Homo sapiens
IIRNRGENSCK

SEQ ID NO: 3200 - protein, 10 aa, Homo sapiens
ALEEKKGNYV

SEQ ID NO: 3201 - protein, 100 aa, Homo sapiens; identical to SEQ ID NO: 3083

SEQ ID NO: 3202 - protein, 10 aa, Homo sapiens
IQLQDKFEHL

SEQ ID NO: 3203 - protein, 9 aa, Homo sapiens
QLQDKFEHL

SEQ ID NO: 3204 - protein, 10 aa, Homo sapiens
QLQDKFEHLK

SEQ ID NO: 3205 - protein, 10 aa, Homo sapiens
YLVIQLQDKF

SEQ ID NO: 3206 - protein, 6 aa, Artificial Sequence
  Description of Artificial Sequence: Synthetic 6xHis tag
HHHHHH

SEQ ID NO: 3207 - protein, 9 aa, Homo sapiens
EYMANGSLL

SEQ ID NO: 3208 - protein, 9 aa, Homo sapiens
MANGSLLNY

SEQ ID NO: 3209 - protein, 9 aa, Homo sapiens
SLLNYLREM

SEQ ID NO: 3210 - protein, 9 aa, Homo sapiens
TEYMANGSL

SEQ ID NO: 3211 - protein, 6 aa, Artificial Sequence
  Description of Artificial Sequence: Synthetic 6xHis tag
HHHHHH

SEQ ID NO: 3212 - protein, 9 aa, Homo sapiens
VLPEPHLAL

SEQ ID NO: 3213 - protein, 10 aa, Homo sapiens
SMLTGPPARV

SEQ ID NO: 3214 - protein, 9 aa, Homo sapiens
MLTGPPARV

SEQ ID NO: 3215 - protein, 9 aa, Homo sapiens
KPKRDGYMF

SEQ ID NO: 3216 - protein, 10 aa, Homo sapiens
KPKRDGYMFL

SEQ ID NO: 3217 - protein, 9 aa, Homo sapiens
ESKIMFATL

SEQ ID NO: 3218 - protein, 9 aa, Homo sapiens
AIQPVLWTT

SEQ ID NO: 3219 - protein, 9 aa, Homo sapiens
MLTGPPARV

SEQ ID NO: 3220 - protein, 10 aa, Homo sapiens
SMLTGPPARV

SEQ ID NO: 3221 - protein, 9 aa, Homo sapiens
VLPEPHLAL

SEQ ID NO: 3222 - protein, 10 aa, Homo sapiens
TLQRSSLWCL

SEQ ID NO: 3223 - protein, 10 aa, Homo sapiens
YMFLKAESKI

SEQ ID NO: 3224 - protein, 9 aa, Homo sapiens
ALQPLQPHA

SEQ ID NO: 3225 - protein, 9 aa, Homo sapiens
KIMFATLQR

SEQ ID NO: 3226 - protein, 10 aa, Homo sapiens
VLWTTPPLQH

SEQ ID NO: 3227 - protein, 9 aa, Homo sapiens
YMFLKAESK

SEQ ID NO: 3228 - protein, 9 aa, Homo sapiens
KIMFATLQR

SEQ ID NO: 3229 - protein, 10 aa, Homo sapiens
VLWTTPPLQH

SEQ ID NO: 3230 - protein, 9 aa, Homo sapiens
YMFLKAESK

SEQ ID NO: 3231 - protein, 9 aa, Homo sapiens
MFLKAESKI

SEQ ID NO: 3232 - protein, 10 aa, Homo sapiens
YMFLKAESKI

SEQ ID NO: 3233 - protein, 9 aa, Homo sapiens
FATLQRSSL

SEQ ID NO: 3234 - protein, 9 aa, Homo sapiens
EPHLALQPL

SEQ ID NO: 3235 - protein, 9 aa, Homo sapiens
KPKRDGYMF

SEQ ID NO: 3236 - protein, 10 aa, Homo sapiens
KPKRDGYMFL

SEQ ID NO: 3237 - protein, 10 aa, Homo sapiens
QPVLWTTPPL

SEQ ID NO: 3238 - protein, 9 aa, Homo sapiens
GPPARVPAV

SEQ ID NO: 3239 - protein, 10 aa, Homo sapiens
MFATLQRSSL

SEQ ID NO: 3240 - protein, 9 aa, Homo sapiens
EPHLALQPL

SEQ ID NO: 3241 - protein, 9 aa, Homo sapiens
ESKIMFATL

SEQ ID NO: 3242 - protein, 9 aa, Homo sapiens
FLKAESKIM

SEQ ID NO: 3243 - protein, 9 aa, Homo sapiens
FATLQRSSL

SEQ ID NO: 3244 - protein, 10 aa, Homo sapiens
YMFLKAESKI

SEQ ID NO: 3245 - protein, 10 aa, Homo sapiens
IMKPKRDGYM

SEQ ID NO: 3246 - protein, 10 aa, Homo sapiens
MFATLQRSSL

SEQ ID NO: 3247 - protein, 10 aa, Homo sapiens
FLKAESKIMF

SEQ ID NO: 3248 - protein, 9 aa, Homo sapiens
LHFCRSSIM

SEQ ID NO: 3249 - protein, 10 aa, Homo sapiens
SMLTGPPARV

SEQ ID NO: 3250 - protein, 9 aa, Homo sapiens
MLTGPPARV

SEQ ID NO: 3251 - protein, 9 aa, Homo sapiens
MLTGPPARV

SEQ ID NO: 3252 - protein, 10 aa, Homo sapiens
SMLTGPPARV

SEQ ID NO: 3253 - protein, 9 aa, Homo sapiens
MLTGPPARV

SEQ ID NO: 3254 - protein, 9 aa, Homo sapiens
VLPEPHLAL

SEQ ID NO: 3255 - protein, 10 aa, Homo sapiens
SMLTGPPARV

SEQ ID NO: 3256 - protein, 9 aa, Homo sapiens
MLTGPPARV

SEQ ID NO: 3257 - protein, 9 aa, Homo sapiens
KIMFATLQR

SEQ ID NO: 3258 - protein, 10 aa, Homo sapiens
KPKRDGYMFL

SEQ ID NO: 3259 - protein, 9 aa, Homo sapiens
KPKRDGYMF

SEQ ID NO: 3260 - protein, 9 aa, Homo sapiens
ESKIMFATL

SEQ ID NO: 3261 - protein, 33 aa, Homo sapiens; identical to SEQ ID NO: 71

SEQ ID NO: 3262 - protein, 9 aa, Homo sapiens
KPKRDGYMF

SEQ ID NO: 3263 - protein, 10 aa, Homo sapiens
KPKRDGYMFL

SEQ ID NO: 3264 - protein, 18 aa, Homo sapiens
SMLTGPPARVPAVPFDLH

SEQ ID NO: 3265 - protein, 10 aa, Homo sapiens
SMLTGPPARV

SEQ ID NO: 3266 - protein, 9 aa, Homo sapiens
MLTGPPARV

SEQ ID NO: 3267 - protein, 21 aa, Artificial Sequence
  Description of Artificial Sequence: Synthetic peptide
EPCSMLTGPPARVPAVPFDLH

SEQ ID NO: 3268 - protein, 26 aa, Artificial Sequence
  Description of Artificial Sequence: Synthetic peptide
GPPARVPAVPFDLHFCRSSIMKPKRD

SEQ ID NO: 3269 - protein, 25 aa, Artificial Sequence
  Description of Artificial Sequence: Synthetic peptide
LHFCRSSIMKPKRDGYMFLKAESKI

SEQ ID NO: 3270 - protein, 23 aa, Artificial Sequence
  Description of Artificial Sequence: Synthetic peptide
KPKRDGYMFLKAESKIMFATLQR

SEQ ID NO: 3271 - protein, 20 aa, Artificial Sequence
  Description of Artificial Sequence: Synthetic peptide
KPKRDGYMFLKAESKIMFAT

SEQ ID NO: 3272 - protein, 24 aa, Artificial Sequence
  Description of Artificial Sequence: Synthetic peptide
KKKKKPKRDGYMFLKAESKIMFAT

SEQ ID NO: 3273 - protein, 16 aa, Artificial Sequence
  Description of Artificial Sequence: Synthetic peptide
KPKRDGYMFLKAESKI

SEQ ID NO: 3274 - protein, 21 aa, Artificial Sequence
  Description of Artificial Sequence: Synthetic peptide
FLKAESKIMFATLQRSSLWCL

SEQ ID NO: 3275 - protein, 23 aa, Artificial Sequence
  Description of Artificial Sequence: Synthetic peptide
YMFLKAESKIMFATLQRSSLWCL

SEQ ID NO: 3276 - protein, 19 aa, Artificial Sequence
  Description of Artificial Sequence: Synthetic peptide
YMFLKAESKIMFATLQRSS

SEQ ID NO: 3277 - protein, 23 aa, Artificial Sequence
  Description of Artificial Sequence: Synthetic peptide
KKKKYMFLKAESKIMFATLQRSS

SEQ ID NO: 3278 - protein, 19 aa, Artificial Sequence
  Description of Artificial Sequence: Synthetic peptide
KAESKIMFATLQRSSLWCL

SEQ ID NO: 3279 - protein, 23 aa, Artificial Sequence
  Description of Artificial Sequence: Synthetic peptide
KKKKKAESKIMFATLQRSSLWCL

SEQ ID NO: 3280 - protein, 16 aa, Artificial Sequence
  Description of Artificial Sequence: Synthetic peptide
DGYMFLKAESKIMFAT

SEQ ID NO: 3281 - protein, 16 aa, Artificial Sequence
  Description of Artificial Sequence: Synthetic peptide
FLKAESKIMFATLQRS

SEQ ID NO: 3282 - protein, 16 aa, Artificial Sequence
  Description of Artificial Sequence: Synthetic peptide
ESKIMFATLQRSSLWC

SEQ ID NO: 3283 - protein, 15 aa, Artificial Sequence
  Description of Artificial Sequence: Synthetic peptide
FLKAESKIMFATLQR

SEQ ID NO: 3284 - protein, 14 aa, Artificial Sequence
  Description of Artificial Sequence: Synthetic peptide
ESKIMFATLQRSSL

SEQ ID NO: 3285 - protein, 19 aa, Artificial Sequence
  Description of Artificial Sequence: Synthetic peptide
KIMFATLQRSSLWCLCSNH

SEQ ID NO: 3286 - protein, 23 aa, Artificial Sequence
  Description of Artificial Sequence: Synthetic peptide
KKKKKIMFATLQRSSLWCLCSNH

SEQ ID NO: 3287 - protein, 17 aa, Artificial Sequence
  Description of Artificial Sequence: Synthetic peptide
MFATLQRSSLWCLCSNH

SEQ ID NO: 3288 - protein, 21 aa, Artificial Sequence
  Description of Artificial Sequence: Synthetic peptide
KKKKMFATLQRSSLWCLCSNH

SEQ ID NO: 3289 - protein, 14 aa, Artificial Sequence
  Description of Artificial Sequence: Synthetic peptide
MFATLQRSSLWCLC

SEQ ID NO: 3290 - protein, 14 aa, Artificial Sequence
  Description of Artificial Sequence: Synthetic peptide
TLQRSSLWCLCSNH

SEQ ID NO: 3291 - protein, 18 aa, Artificial Sequence
  Description of Artificial Sequence: Synthetic peptide
SMLTGPPARVPAVPFDLH

SEQ ID NO: 3292 - protein, 33 aa, Artificial Sequence; identical to SEQ ID NO: 71
  Description of Artificial Sequence: Synthetic polypeptide

SEQ ID NO: 3293 - protein, 29 aa, Artificial Sequence
  Description of Artificial Sequence: Synthetic peptide
KPKRDGYMFLKAESKIMFATLQRSSLWCL

SEQ ID NO: 3294 - protein, 39 aa, Artificial Sequence; identical to SEQ ID NO: 1532
  Description of Artificial Sequence: Synthetic polypeptide

SEQ ID NO: 3295 - protein, 21 aa, Artificial Sequence
  Description of Artificial Sequence: Synthetic peptide
EPCSMLTGPPARVPAVPFDLH

SEQ ID NO: 3296 - protein, 18 aa, Artificial Sequence
  Description of Artificial Sequence: Synthetic peptide
SMLTGPPARVPAVPFDLH

SEQ ID NO: 3297 - protein, 26 aa, Artificial Sequence
  Description of Artificial Sequence: Synthetic peptide
GPPARVPAVPFDLHFCRSSIMKPKRD

SEQ ID NO: 3298 - protein, 25 aa, Artificial Sequence
  Description of Artificial Sequence: Synthetic peptide
LHFCRSSIMKPKRDGYMFLKAESKI

SEQ ID NO: 3299 - protein, 23 aa, Artificial Sequence
  Description of Artificial Sequence: Synthetic peptide
KPKRDGYMFLKAESKIMFATLQR

SEQ ID NO: 3300 - protein, 21 aa, Artificial Sequence
  Description of Artificial Sequence: Synthetic peptide
FLKAESKIMFATLQRSSLWCL

SEQ ID NO: 3301 - protein, 19 aa, Artificial Sequence
  Description of Artificial Sequence: Synthetic peptide
KIMFATLQRSSLWCLCSNH

SEQ ID NO: 3302 - protein, 20 aa, Artificial Sequence
  Description of Artificial Sequence: Synthetic peptide
KPKRDGYMFLKAESKIMFAT

SEQ ID NO: 3303 - protein, 23 aa, Artificial Sequence
  Description of Artificial Sequence: Synthetic peptide
YMFLKAESKIMFATLQRSSLWCL

SEQ ID NO: 3304 - protein, 19 aa, Artificial Sequence
  Description of Artificial Sequence: Synthetic peptide
YMFLKAESKIMFATLQRSS

SEQ ID NO: 3305 - protein, 19 aa, Artificial Sequence
  Description of Artificial Sequence: Synthetic peptide
KAESKIMFATLQRSSLWCL

SEQ ID NO: 3306 - protein, 17 aa, Artificial Sequence
  Description of Artificial Sequence: Synthetic peptide
MFATLQRSSLWCLCSNH

SEQ ID NO: 3307 - protein, 24 aa, Artificial Sequence
  Description of Artificial Sequence: Synthetic peptide
KKKKKPKRDGYMFLKAESKIMFAT

SEQ ID NO: 3308 - protein, 23 aa, Artificial Sequence
  Description of Artificial Sequence: Synthetic peptide
KKKKYMFLKAESKIMFATLQRSS

SEQ ID NO: 3309 - protein, 23 aa, Artificial Sequence
  Description of Artificial Sequence: Synthetic peptide
KKKKKAESKIMFATLQRSSLWCL

SEQ ID NO: 3310 - protein, 21 aa, Artificial Sequence
  Description of Artificial Sequence: Synthetic peptide
KKKKMFATLQRSSLWCLCSNH

SEQ ID NO: 3311 - protein, 23 aa, Artificial Sequence
  Description of Artificial Sequence: Synthetic peptide
KKKKKIMFATLQRSSLWCLCSNH

SEQ ID NO: 3312 - protein, 16 aa, Artificial Sequence
  Description of Artificial Sequence: Synthetic peptide
KPKRDGYMFLKAESKI

SEQ ID NO: 3313 - protein, 16 aa, Artificial Sequence
  Description of Artificial Sequence: Synthetic peptide
DGYMFLKAESKIMFAT

SEQ ID NO: 3314 - protein, 16 aa, Artificial Sequence
  Description of Artificial Sequence: Synthetic peptide
FLKAESKIMFATLQRS

SEQ ID NO: 3315 - protein, 16 aa, Artificial Sequence
  Description of Artificial Sequence: Synthetic peptide
ESKIMFATLQRSSLWC

SEQ ID NO: 3316 - protein, 15 aa, Artificial Sequence
  Description of Artificial Sequence: Synthetic peptide
FLKAESKIMFATLQR

SEQ ID NO: 3317 - protein, 14 aa, Artificial Sequence
  Description of Artificial Sequence: Synthetic peptide
ESKIMFATLQRSSL

SEQ ID NO: 3318 - protein, 14 aa, Artificial Sequence
  Description of Artificial Sequence: Synthetic peptide
MFATLQRSSLWCLC

SEQ ID NO: 3319 - protein, 14 aa, Artificial Sequence
  Description of Artificial Sequence: Synthetic peptide
TLQRSSLWCLCSNH

SEQ ID NO: 3320 - protein, 33 aa, Artificial Sequence; identical to SEQ ID NO: 71
  Description of Artificial Sequence: Synthetic polypeptide

SEQ ID NO: 3321 - protein, 29 aa, Artificial Sequence
  Description of Artificial Sequence: Synthetic peptide
KPKRDGYMFLKAESKIMFATLQRSSLWCL

SEQ ID NO: 3322 - protein, 39 aa, Artificial Sequence; identical to SEQ ID NO: 1532
  Description of Artificial Sequence: Synthetic polypeptide

SEQ ID NO: 3323 - protein, 24 aa, Artificial Sequence
  Description of Artificial Sequence: Synthetic peptide
KKKKKPKRDGYMFLKAESKIMFAT

SEQ ID NO: 3324 - protein, 23 aa, Artificial Sequence
  Description of Artificial Sequence: Synthetic peptide
KKKKYMFLKAESKIMFATLQRSS

SEQ ID NO: 3325 - protein, 23 aa, Artificial Sequence
  Description of Artificial Sequence: Synthetic peptide
KKKKKAESKIMFATLQRSSLWCL

SEQ ID NO: 3326 - protein, 21 aa, Artificial Sequence
  Description of Artificial Sequence: Synthetic peptide
KKKKMFATLQRSSLWCLCSNH

SEQ ID NO: 3327 - protein, 23 aa, Artificial Sequence
  Description of Artificial Sequence: Synthetic peptide
KKKKKIMFATLQRSSLWCLCSNH

SEQ ID NO: 3328 - protein, 21 aa, Artificial Sequence
  Description of Artificial Sequence: Synthetic peptide
EPCSMLTGPPARVPAVPFDLH

SEQ ID NO: 3329 - protein, 18 aa, Artificial Sequence
  Description of Artificial Sequence: Synthetic peptide
SMLTGPPARVPAVPFDLH

SEQ ID NO: 3330 - protein, 26 aa, Artificial Sequence
  Description of Artificial Sequence: Synthetic peptide
GPPARVPAVPFDLHFCRSSIMKPKRD

SEQ ID NO: 3331 - protein, 16 aa, Artificial Sequence
  Description of Artificial Sequence: Synthetic peptide
KPKRDGYMFLKAESKI

SEQ ID NO: 3332 - protein, 15 aa, Artificial Sequence
  Description of Artificial Sequence: Synthetic peptide
FLKAESKIMFATLQR

SEQ ID NO: 3333 - protein, 14 aa, Artificial Sequence
  Description of Artificial Sequence: Synthetic peptide
ESKIMFATLQRSSL

SEQ ID NO: 3334 - protein, 33 aa, Artificial Sequence; identical to SEQ ID NO: 71
  Description of Artificial Sequence: Synthetic polypeptide

SEQ ID NO: 3335 - protein, 25 aa, Artificial Sequence
  Description of Artificial Sequence: Synthetic peptide
LHFCRSSIMKPKRDGYMFLKAESKI

SEQ ID NO: 3336 - protein, 21 aa, Artificial Sequence
  Description of Artificial Sequence: Synthetic peptide
EPCSMLTGPPARVPAVPFDLH

SEQ ID NO: 3337 - protein, 26 aa, Artificial Sequence
  Description of Artificial Sequence: Synthetic peptide
GPPARVPAVPFDLHFCRSSIMKPKRD

SEQ ID NO: 3338 - protein, 25 aa, Artificial Sequence
  Description of Artificial Sequence: Synthetic peptide
LHFCRSSIMKPKRDGYMFLKAESKI

SEQ ID NO: 3339 - protein, 20 aa, Artificial Sequence
  Description of Artificial Sequence: Synthetic peptide
KPKRDGYMFLKAESKIMFAT

SEQ ID NO: 3340 - protein, 19 aa, Artificial Sequence
  Description of Artificial Sequence: Synthetic peptide
YMFLKAESKIMFATLQRSS

SEQ ID NO: 3341 - protein, 19 aa, Artificial Sequence
  Description of Artificial Sequence: Synthetic peptide
KAESKIMFATLQRSSLWCL

SEQ ID NO: 3342 - protein, 17 aa, Artificial Sequence
  Description of Artificial Sequence: Synthetic peptide
MFATLQRSSLWCLCSNH

SEQ ID NO: 3343 - protein, 23 aa, Artificial Sequence
  Description of Artificial Sequence: Synthetic peptide
KPKRDGYMFLKAESKIMFATLQR

SEQ ID NO: 3344 - protein, 16 aa, Artificial Sequence
  Description of Artificial Sequence: Synthetic peptide
KPKRDGYMFLKAESKI

SEQ ID NO: 3345 - protein, 21 aa, Artificial Sequence
  Description of Artificial Sequence: Synthetic peptide
FLKAESKIMFATLQRSSLWCL

SEQ ID NO: 3346 - protein, 16 aa, Artificial Sequence
  Description of Artificial Sequence: Synthetic peptide
DGYMFLKAESKIMFAT

SEQ ID NO: 3347 - protein, 16 aa, Artificial Sequence
  Description of Artificial Sequence: Synthetic peptide
FLKAESKIMFATLQRS

SEQ ID NO: 3348 - protein, 16 aa, Artificial Sequence
  Description of Artificial Sequence: Synthetic peptide
ESKIMFATLQRSSLWC

SEQ ID NO: 3349 - protein, 14 aa, Artificial Sequence
  Description of Artificial Sequence: Synthetic peptide
MFATLQRSSLWCLC

SEQ ID NO: 3350 - protein, 14 aa, Artificial Sequence
  Description of Artificial Sequence: Synthetic peptide
TLQRSSLWCLCSNH

SEQ ID NO: 3351 - protein, 33 aa, Artificial Sequence; identical to SEQ ID NO: 71
  Description of Artificial Sequence: Synthetic polypeptide

SEQ ID NO: 3352 - protein, 18 aa, Artificial Sequence
  Description of Artificial Sequence: Synthetic peptide
SMLTGPPARVPAVPFDLH

SEQ ID NO: 3353 - protein, 14 aa, Artificial Sequence
  Description of Artificial Sequence: Synthetic peptide
ESKIMFATLQRSSL

SEQ ID NO: 3354 - protein, 15 aa, Homo sapiens
HGLEPCSMLTGPPAR

SEQ ID NO: 3355 - protein, 8 aa, Homo sapiens
RDGYMFLK

SEQ ID NO: 3356 - protein, 7 aa, Homo sapiens
SSIMKPK

SEQ ID NO: 3357 - protein, 17 aa, Homo sapiens
AGTSCANCQTTTTTLWR

SEQ ID NO: 3358 - protein, 18 aa, Homo sapiens
ALGSHHTASPWNLSPFSK

SEQ ID NO: 3359 - protein, 16 aa, Homo sapiens
DGTGHYLCNACGLYHK

SEQ ID NO: 3360 - protein, 18 aa, Homo sapiens
DVSPDPSLSTPGSAGSAR

SEQ ID NO: 3361 - protein, 14 aa, Homo sapiens
ECVNCGATSTPLWR

SEQ ID NO: 3362 - protein, 6 aa, Homo sapiens
EGIQTR

SEQ ID NO: 3363 - protein, 8 aa, Homo sapiens
EGIQTRNR

SEQ ID NO: 3364 - protein, 7 aa, Homo sapiens
KEGIQTR

SEQ ID NO: 3365 - protein, 11 aa, Homo sapiens
KVHDSLEDFPK

SEQ ID NO: 3366 - protein, 11 aa, Homo sapiens
LHNINRPLTMK

SEQ ID NO: 3367 - protein, 12 aa, Homo sapiens
LHNINRPLTMKK

SEQ ID NO: 3368 - protein, 12 aa, Homo sapiens
MNGQNRPLIKPK

SEQ ID NO: 3369 - protein, 16 aa, Homo sapiens
NANGDPVCNACGLYYK

SEQ ID NO: 3370 - protein, 11 aa, Homo sapiens
NSSFNPAALSR

SEQ ID NO: 3371 - protein, 18 aa, Homo sapiens
RAGTSCANCQTTTTTLWR

SEQ ID NO: 3372 - protein, 17 aa, Homo sapiens
RDGTGHYLCNACGLYHK

SEQ ID NO: 3373 - protein, 20 aa, Homo sapiens
SSTEGRECVNCGATSTPLWR

SEQ ID NO: 3374 - protein, 10 aa, Homo sapiens
VHDSLEDFPK

SEQ ID NO: 3375 - protein, 10 aa, Homo sapiens
YQVPLPDSMK

SEQ ID NO: 3376 - protein, 8 aa, Artificial Sequence
  Description of Artificial Sequence: Synthetic peptide
RAKFKQLL

SEQ ID NO: 3377 - protein, 9 aa, Homo sapiens
MLTGPPARV

SEQ ID NO: 3378 - protein, 10 aa, Homo sapiens
SMLTGPPARV

SEQ ID NO: 3379 - protein, 10 aa, Homo sapiens
TLQRSSLWCL

SEQ ID NO: 3380 - protein, 10 aa, Homo sapiens
YMFLKAESKI

SEQ ID NO: 3381 - protein, 9 aa, Homo sapiens
FATLQRSSL

SEQ ID NO: 3382 - protein, 9 aa, Homo sapiens
KPKRDGYMF

SEQ ID NO: 3383 - protein, 10 aa, Homo sapiens
KPKRDGYMFL

SEQ ID NO: 3384 - protein, 9 aa, Homo sapiens
GPPARVPAV

SEQ ID NO: 3385 - protein, 10 aa, Homo sapiens
MFATLQRSSL

SEQ ID NO: 3386 - protein, 9 aa, Homo sapiens
ESKIMFATL

SEQ ID NO: 3387 - protein, 9 aa, Homo sapiens
FLKAESKIM

SEQ ID NO: 3388 - protein, 9 aa, Homo sapiens
FATLQRSSL

SEQ ID NO: 3389 - protein, 10 aa, Homo sapiens
YMFLKAESKI

SEQ ID NO: 3390 - protein, 10 aa, Homo sapiens
IMKPKRDGYM

SEQ ID NO: 3391 - protein, 10 aa, Homo sapiens
MFATLQRSSL

SEQ ID NO: 3392 - protein, 10 aa, Homo sapiens
FLKAESKIMF

SEQ ID NO: 3393 - protein, 9 aa, Homo sapiens
LHFCRSSIM

SEQ ID NO: 3394 - protein, 10 aa, Homo sapiens
TLQRSSLWCL

SEQ ID NO: 3395 - protein, 9 aa, Homo sapiens
MLTGPPARV

SEQ ID NO: 3396 - protein, 10 aa, Homo sapiens
YMFLKAESKI

SEQ ID NO: 3397 - protein, 10 aa, Homo sapiens
SMLTGPPARV

SEQ ID NO: 3398 - protein, 10 aa, Homo sapiens
KPKRDGYMFL

SEQ ID NO: 3399 - protein, 9 aa, Homo sapiens
KPKRDGYMF

SEQ ID NO: 3400 - protein, 9 aa, Homo sapiens
FATLQRSSL

SEQ ID NO: 3401 - protein, 10 aa, Homo sapiens
MFATLQRSSL

SEQ ID NO: 3402 - protein, 9 aa, Homo sapiens
GPPARVPAV

SEQ ID NO: 3403 - protein, 10 aa, Homo sapiens
FLKAESKIMF

SEQ ID NO: 3404 - protein, 9 aa, Homo sapiens
FATLQRSSL

SEQ ID NO: 3405 - protein, 10 aa, Homo sapiens
MFATLQRSSL

SEQ ID NO: 3406 - protein, 9 aa, Homo sapiens
ESKIMFATL

SEQ ID NO: 3407 - protein, 9 aa, Homo sapiens
FLKAESKIM

SEQ ID NO: 3408 - protein, 9 aa, Homo sapiens
LHFCRSSIM

SEQ ID NO: 3409 - protein, 10 aa, Homo sapiens
IMKPKRDGYM

SEQ ID NO: 3410 - protein, 10 aa, Homo sapiens
YMFLKAESKI

SEQ ID NO: 3411 - protein, 10 aa, Homo sapiens
SMLTGPPARV

SEQ ID NO: 3412 - protein, 9 aa, Homo sapiens
MLTGPPARV

SEQ ID NO: 3413 - protein, 9 aa, Homo sapiens
KPKRDGYMF

SEQ ID NO: 3414 - protein, 10 aa, Homo sapiens
KPKRDGYMFL

SEQ ID NO: 3415 - protein, 9 aa, Homo sapiens
ESKIMFATL

SEQ ID NO: 3416 - protein, 10 aa, Artificial Sequence
  Description of Artificial Sequence: Synthetic peptide
SMLTGPPARV

SEQ ID NO: 3417 - protein, 9 aa, Artificial Sequence
  Description of Artificial Sequence: Synthetic peptide
MLTGPPARV

SEQ ID NO: 3418 - protein, 9 aa, Artificial Sequence
  Description of Artificial Sequence: Synthetic peptide
KPKRDGYMF

SEQ ID NO: 3419 - protein, 10 aa, Artificial Sequence
  Description of Artificial Sequence: Synthetic peptide
KPKRDGYMFL

SEQ ID NO: 3420 - protein, 9 aa, Artificial Sequence
  Description of Artificial Sequence: Synthetic peptide
ESKIMFATL

SEQ ID NO: 3421 - protein, 9 aa, Homo sapiens
MLTGPPARV

SEQ ID NO: 3422 - protein, 9 aa, Homo sapiens
MLTGPPARV

SEQ ID NO: 3423 - protein, 10 aa, Homo sapiens
SMLTGPPARV

SEQ ID NO: 3424 - protein, 10 aa, Homo sapiens
SMLTGPPARV

SEQ ID NO: 3425 - protein, 10 aa, Homo sapiens
TLQRSSLWCL

SEQ ID NO: 3426 - protein, 10 aa, Homo sapiens
TLQRSSLWCL

SEQ ID NO: 3427 - protein, 10 aa, Homo sapiens
TLQRSSLWCL

SEQ ID NO: 3428 - protein, 10 aa, Homo sapiens
TLQRSSLWCL

SEQ ID NO: 3429 - protein, 10 aa, Homo sapiens
TLQRSSLWCL

SEQ ID NO: 3430 - protein, 10 aa, Homo sapiens
TLQRSSLWCL

SEQ ID NO: 3431 - protein, 10 aa, Homo sapiens
YMFLKAESKI

SEQ ID NO: 3432 - protein, 10 aa, Homo sapiens
YMFLKAESKI

SEQ ID NO: 3433 - protein, 10 aa, Homo sapiens
YMFLKAESKI

SEQ ID NO: 3434 - protein, 10 aa, Homo sapiens
YMFLKAESKI

SEQ ID NO: 3435 - protein, 9 aa, Homo sapiens
FATLQRSSL

SEQ ID NO: 3436 - protein, 9 aa, Homo sapiens
GPPARVPAV

SEQ ID NO: 3437 - protein, 9 aa, Homo sapiens
KPKRDGYMF

SEQ ID NO: 3438 - protein, 9 aa, Homo sapiens
KPKRDGYMF

SEQ ID NO: 3439 - protein, 9 aa, Homo sapiens
KPKRDGYMF

SEQ ID NO: 3440 - protein, 9 aa, Homo sapiens
KPKRDGYMF

SEQ ID NO: 3441 - protein, 10 aa, Homo sapiens
KPKRDGYMFL

SEQ ID NO: 3442 - protein, 10 aa, Homo sapiens
KPKRDGYMFL

SEQ ID NO: 3443 - protein, 10 aa, Homo sapiens
KPKRDGYMFL

SEQ ID NO: 3444 - protein, 10 aa, Homo sapiens
KPKRDGYMFL

SEQ ID NO: 3445 - protein, 10 aa, Homo sapiens
MFATLQRSSL

SEQ ID NO: 3446 - protein, 10 aa, Homo sapiens
MFATLQRSSL

SEQ ID NO: 3447 - protein, 9 aa, Homo sapiens
ESKIMFATL

SEQ ID NO: 3448 - protein, 9 aa, Homo sapiens
ESKIMFATL

SEQ ID NO: 3449 - protein, 9 aa, Homo sapiens
FATLQRSSL

SEQ ID NO: 3450 - protein, 9 aa, Homo sapiens
FLKAESKIM

SEQ ID NO: 3451 - protein, 9 aa, Homo sapiens
FLKAESKIM

SEQ ID NO: 3452 - protein, 9 aa, Homo sapiens
FLKAESKIM

SEQ ID NO: 3453 - protein, 9 aa, Homo sapiens
FLKAESKIM

SEQ ID NO: 3454 - protein, 10 aa, Homo sapiens
FLKAESKIMF

SEQ ID NO: 3455 - protein, 10 aa, Homo sapiens
FLKAESKIMF

SEQ ID NO: 3456 - protein, 10 aa, Homo sapiens
IMKPKRDGYM

SEQ ID NO: 3457 - protein, 10 aa, Homo sapiens
IMKPKRDGYM

SEQ ID NO: 3458 - protein, 10 aa, Homo sapiens
IMKPKRDGYM

SEQ ID NO: 3459 - protein, 10 aa, Homo sapiens
IMKPKRDGYM

SEQ ID NO: 3460 - protein, 10 aa, Homo sapiens
IMKPKRDGYM

SEQ ID NO: 3461 - protein, 10 aa, Homo sapiens
IMKPKRDGYM

SEQ ID NO: 3462 - protein, 9 aa, Homo sapiens
LHFCRSSIM

SEQ ID NO: 3463 - protein, 9 aa, Homo sapiens
LHFCRSSIM

SEQ ID NO: 3464 - protein, 9 aa, Homo sapiens
LHFCRSSIM

SEQ ID NO: 3465 - protein, 9 aa, Homo sapiens
LHFCRSSIM

SEQ ID NO: 3466 - protein, 9 aa, Homo sapiens
LHFCRSSIM

SEQ ID NO: 3467 - protein, 9 aa, Homo sapiens
LHFCRSSIM

SEQ ID NO: 3468 - protein, 10 aa, Homo sapiens
MFATLQRSSL

SEQ ID NO: 3469 - protein, 10 aa, Homo sapiens
MFATLQRSSL

SEQ ID NO: 3470 - protein, 10 aa, Homo sapiens
YMFLKAESKI

SEQ ID NO: 3471 - protein, 10 aa, Homo sapiens
YMFLKAESKI

SEQ ID NO: 3472 - protein, 10 aa, Homo sapiens
YMFLKAESKI

SEQ ID NO: 3473 - protein, 10 aa, Homo sapiens
YMFLKAESKI

SEQ ID NO: 3474 - protein, 10 aa, Homo sapiens
SMLTGPPARV

SEQ ID NO: 3475 - protein, 9 aa, Homo sapiens
MLTGPPARV

SEQ ID NO: 3476 - protein, 10 aa, Homo sapiens
SMLTGPPARV

SEQ ID NO: 3477 - protein, 9 aa, Homo sapiens
MLTGPPARV

SEQ ID NO: 3478 - protein, 9 aa, Homo sapiens
KPKRDGYMF

SEQ ID NO: 3479 - protein, 10 aa, Homo sapiens
KPKRDGYMFL

SEQ ID NO: 3480 - protein, 9 aa, Homo sapiens
ESKIMFATL

SEQ ID NO: 3481 - protein, 10 aa, Homo sapiens
SMLTGPPARV

SEQ ID NO: 3482 - protein, 9 aa, Homo sapiens
MLTGPPARV

SEQ ID NO: 3483 - protein, 9 aa, Homo sapiens
KPKRDGYMF

SEQ ID NO: 3484 - protein, 10 aa, Homo sapiens
KPKRDGYMFL

SEQ ID NO: 3485 - protein, 9 aa, Homo sapiens
ESKIMFATL

SEQ ID NO: 3486 - protein, 10 aa, Homo sapiens
SMLTGPPARV

SEQ ID NO: 3487 - protein, 9 aa, Homo sapiens
MLTGPPARV

SEQ ID NO: 3488 - protein, 9 aa, Homo sapiens
KPKRDGYMF

SEQ ID NO: 3489 - protein, 10 aa, Homo sapiens
KPKRDGYMFL

SEQ ID NO: 3490 - protein, 9 aa, Homo sapiens
KPKRDGYMF

SEQ ID NO: 3491 - protein, 10 aa, Homo sapiens
KPKRDGYMFL

SEQ ID NO: 3492 - protein, 9 aa, Homo sapiens
ESKIMFATL

SEQ ID NO: 3493 - protein, 9 aa, Homo sapiens
ESKIMFATL

SEQ ID NO: 3494 - protein, 9 aa, Homo sapiens
ESKIMFATL

SEQ ID NO: 3495 - protein, 10 aa, Homo sapiens
SMLTGPPARV

SEQ ID NO: 3496 - protein, 9 aa, Homo sapiens
MLTGPPARV

SEQ ID NO: 3497 - protein, 9 aa, Homo sapiens
KPKRDGYMF

SEQ ID NO: 3498 - protein, 10 aa, Homo sapiens
KPKRDGYMFL

SEQ ID NO: 3499 - protein, 9 aa, Homo sapiens
ESKIMFATL

SEQ ID NO: 3500 - protein, 10 aa, Homo sapiens
SMLTGPPARV

SEQ ID NO: 3501 - protein, 10 aa, Homo sapiens
YMFLKAESKI

SEQ ID NO: 3502 - protein, 9 aa, Homo sapiens
VLPEPHLAL

SEQ ID NO: 3503 - protein, 10 aa, Homo sapiens
TLQRSSLWCL

SEQ ID NO: 3504 - protein, 9 aa, Homo sapiens
MLTGPPARV

SEQ ID NO: 3505 - protein, 9 aa, Homo sapiens
YMFLKAESK

SEQ ID NO: 3506 - protein, 9 aa, Homo sapiens
KIMFATLQR

SEQ ID NO: 3507 - protein, 10 aa, Homo sapiens
VLWTTPPLQH

SEQ ID NO: 3508 - protein, 10 aa, Homo sapiens
YMFLKAESKI

SEQ ID NO: 3509 - protein, 9 aa, Homo sapiens
MFLKAESKI

SEQ ID NO: 3510 - protein, 9 aa, Homo sapiens
YMFLKAESK

SEQ ID NO: 3511 - protein, 9 aa, Homo sapiens
KIMFATLQR

SEQ ID NO: 3512 - protein, 10 aa, Homo sapiens
VLWTTPPLQH

SEQ ID NO: 3513 - protein, 10 aa, Homo sapiens
KPKRDGYMFL

SEQ ID NO: 3514 - protein, 9 aa, Homo sapiens
FATLQRSSL

SEQ ID NO: 3515 - protein, 9 aa, Homo sapiens
EPHLALQPL

SEQ ID NO: 3516 - protein, 9 aa, Homo sapiens
KPKRDGYMF

SEQ ID NO: 3517 - protein, 9 aa, Homo sapiens
GPPARVPAV

SEQ ID NO: 3518 - protein, 9 aa, Homo sapiens
FATLQRSSL

SEQ ID NO: 3519 - protein, 9 aa, Homo sapiens
ESKIMFATL

SEQ ID NO: 3520 - protein, 9 aa, Homo sapiens
FLKAESKIM

SEQ ID NO: 3521 - protein, 9 aa, Homo sapiens
EPHLALQPL

SEQ ID NO: 3522 - protein, 10 aa, Homo sapiens
YMFLKAESKI

SEQ ID NO: 3523 - protein, 10 aa, Homo sapiens
MFATLQRSSL

SEQ ID NO: 3524 - protein, 10 aa, Homo sapiens
IMKPKRDGYM

SEQ ID NO: 3525 - protein, 10 aa, Homo sapiens
FLKAESKIMF

SEQ ID NO: 3526 - protein, 9 aa, Homo sapiens
MLTGPPARV

SEQ ID NO: 3527 - protein, 10 aa, Homo sapiens
SMLTGPPARV

SEQ ID NO: 3528 - protein, 9 aa, Homo sapiens
GPPARVPAV

SEQ ID NO: 3529 - protein, 9 aa, Homo sapiens
KPKRDGYMF

SEQ ID NO: 3530 - protein, 9 aa, Homo sapiens
ESKIMFATL

SEQ ID NO: 3531 - protein, 27 aa, Artificial Sequence
  Description of Artificial Sequence: Synthetic peptide
PGRPLQTHVLPEPHLALQPLQPHADHA

SEQ ID NO: 3532 - protein, 26 aa, Artificial Sequence
  Description of Artificial Sequence: Synthetic peptide
APAIQPVLWTTPPLQHGHRHGLEPCS

SEQ ID NO: 3533 - protein, 25 aa, Artificial Sequence
  Description of Artificial Sequence: Synthetic peptide
PPARVPAVPFDLHFCRSSIMKPKRD

SEQ ID NO: 3534 - protein, 26 aa, Artificial Sequence
  Description of Artificial Sequence: Synthetic peptide
EPHLALQPLQPHADHAHADAPAIQPV

SEQ ID NO: 3535 - protein, 27 aa, Artificial Sequence
  Description of Artificial Sequence: Synthetic peptide
TPPLQHGHRHGLEPCSMLTGPPARVPA

SEQ ID NO: 3536 - protein, 25 aa, Artificial Sequence
  Description of Artificial Sequence: Synthetic peptide
DLHFCRSSIMKPKRDGYMFLKAESK

SEQ ID NO: 3537 - protein, 23 aa, Artificial Sequence
  Description of Artificial Sequence: Synthetic peptide
KAESKIMFATLQRSSLWCLCSNH

SEQ ID NO: 3538 - protein, 24 aa, Artificial Sequence
  Description of Artificial Sequence: Synthetic peptide
HADHAHADAPAIQPVLWTTPPLQH

SEQ ID NO: 3539 - protein, 24 aa, Artificial Sequence
  Description of Artificial Sequence: Synthetic peptide
EPCSMLTGPPARVPAVPFDLHFCR

SEQ ID NO: 3540 - protein, 24 aa, Artificial Sequence
  Description of Artificial Sequence: Synthetic peptide
KPKRDGYMFLKAESKIMFATLQRS

SEQ ID NO: 3541 - protein, 26 aa, Artificial Sequence
  Description of Artificial Sequence: Synthetic peptide
EPHLALQPLQPHADHAHADAPAIQPV

SEQ ID NO: 3542 - protein, 26 aa, Artificial Sequence
  Description of Artificial Sequence: Synthetic peptide
APAIQPVLWTTPPLQHGHRHGLEPCS

SEQ ID NO: 3543 - protein, 25 aa, Artificial Sequence
  Description of Artificial Sequence: Synthetic peptide
PPARVPAVPFDLHFCRSSIMKPKRD

SEQ ID NO: 3544 - protein, 25 aa, Artificial Sequence
  Description of Artificial Sequence: Synthetic peptide
DLHFCRSSIMKPKRDGYMFLKAESK

SEQ ID NO: 3545 - protein, 24 aa, Artificial Sequence
  Description of Artificial Sequence: Synthetic peptide
KPKRDGYMFLKAESKIMFATLQRS

SEQ ID NO: 3546 - protein, 24 aa, Artificial Sequence
  Description of Artificial Sequence: Synthetic peptide
LKAESKIMFATLQRSSLWCLCSNH

SEQ ID NO: 3547 - protein, 9 aa, Homo sapiens
MLTGPPARV

SEQ ID NO: 3548 - protein, 9 aa, Homo sapiens
MLTGPPARV

SEQ ID NO: 3549 - protein, 9 aa, Homo sapiens
MLTGPPARV

SEQ ID NO: 3550 - protein, 9 aa, Homo sapiens
MLTGPPARV

SEQ ID NO: 3551 - protein, 13 aa, Homo sapiens
CALDIYGNNRLAF

SEQ ID NO: 3552 - protein, 19 aa, Homo sapiens
CASSLDFVLAGSYSYEQFF

SEQ ID NO: 3553 - protein, 13 aa, Homo sapiens
CALDIYGNNRLAF

SEQ ID NO: 3554 - protein, 20 aa, Homo sapiens
CASSLDFVLAGSYSYNEQFF

SEQ ID NO: 3555 - protein, 20 aa, Homo sapiens
CASSLDFVLAGSYSYNEQFF

SEQ ID NO: 3556 - protein, 13 aa, Homo sapiens
CALDIYGNNRLAF

SEQ ID NO: 3557 - protein, 14 aa, Homo sapiens
CAEKVPNTGNQFYF

SEQ ID NO: 3558 - protein, 15 aa, Homo sapiens
CASSSLGTVRTEAFF

SEQ ID NO: 3559 - protein, 13 aa, Homo sapiens
CAVEAYNFNKFYF

SEQ ID NO: 3560 - protein, 11 aa, Homo sapiens
CASRSENTIYF

SEQ ID NO: 3561 - protein, 13 aa, Homo sapiens
CILSDSGNTPLVF

SEQ ID NO: 3562 - protein, 15 aa, Homo sapiens
CASSDWAVSGNTIYF

SEQ ID NO: 3563 - protein, 17 aa, Homo sapiens
CAGAANAGGTSYGKLTF

SEQ ID NO: 3564 - protein, 15 aa, Homo sapiens
CASSQAQGANYGYTF

SEQ ID NO: 3565 - protein, 16 aa, Homo sapiens
CAEIPTFSGGYNKLIF

SEQ ID NO: 3566 - protein, 13 aa, Homo sapiens
CASSLAGQETQYF

SEQ ID NO: 3567 - protein, 13 aa, Homo sapiens
CLRGGSTLGRLYF

SEQ ID NO: 3568 - protein, 18 aa, Homo sapiens
CASSLYPTGGSGMDEQYF

SEQ ID NO: 3569 - protein, 15 aa, Homo sapiens
CAVRDGNTGGFKTIF

SEQ ID NO: 3570 - protein, 13 aa, Homo sapiens
CASSELKTGGAFF

SEQ ID NO: 3571 - DNA, 453 bp, Homo sapiens
atggctttttggctgagaaggctgggtctacatttcaggccacatttggggagacgaatggagtcattcctgggaggtgttttgctgattttgtggcttcaagtggactgggtgaagagccaaaagatagaacagaattccgaggccctgaacattcaggagggtaaaacggccaccctgacctgcaactatacaaactattctccagcatacttacagtggtaccgacaagatccaggaagaggccctgttttcttgctactcatacgtgaaaatgagaaagaaaaaaggaaagaaagactgaaggtcacctttgataccacccttaaacagagtttgtttcatatcacagcctcccagcctgcagactcagctacctacctctgtgctctagacatttatgggaacaacagactcgcttttgggaaggggaaccaagtggtggtcatacca

SEQ ID NO: 3572 - DNA, 415 bp, Homo sapiens
atgggaatcaggctcctctgtcgtgtggccttttgtttcctggctgtaggcctcgtagatgtgaaagtaacccagagctcgagatatctagtcaaaaggacgggagagaaagtttttctggaatgtgtccaggatatggaccatgaaaatatgttctggtatcgacaagacccaggtctggggctacggctgatctatttctcatatgatgttaaaatgaaagaaaaaggagatattcctgaggggtacagtgtctctagagagaagaaggagcgcttctccctgattctggagtccgccagcaccaaccagacatctatgtacctctgtgccagcagtttagattttgtgctagcggggtcctactcctacaatgagcagttcttcgggccagggacacggctcaccgtgctag

SEQ ID NO: 3573 - DNA, 453 bp, Artificial Sequence
  Description of Artificial Sequence: Synthetic polynucleotide
atggccttctggctgaggagactgggtttacacttcagaccccatttaggcagaagaatggagagctttttaggcggcgtgctgctgattttatggctgcaagttgactgggtgaagagccagaagatcgagcagaacagcgaggctttaaacattcaagaaggcaagacagccactttaacttgtaactataccaactactcccccgcttatttacagtggtacagacaagatcccggcagaggccccgtgtttttactgctgattcgtgagaacgagaaggagaagaggaaggagagactgaaggtgaccttcgacaccactttaaagcagtctttattccacatcaccgccagccagcccgctgatagcgccacctatttatgcgctttagacatctacggcaacaatcgtctggccttcggcaagggcaaccaagttgtggtgatcccc

SEQ ID NO: 3574 - DNA, 414 bp, Artificial Sequence
  Description of Artificial Sequence: Synthetic polynucleotide
atgggcattcgtctgctgtgtcgtgtggccttctgctttttagccgtgggtttagtggacgtgaaggtgacccagtcctctcgttatttagtgaagaggaccggcgagaaggtgtttttagaatgcgtgcaagatatggaccacgagaacatgttctggtacagacaagatcccggactgggtttaaggctgatctacttcagctacgacgtgaagatgaaggagaagggcgacatccccgagggctactccgtgtctcgtgagaagaaggagaggttctctttaattttagagtccgccagcaccaaccagaccagcatgtatttatgcgccagctctttagactttgtgctggccggcagctacagctacaacgagcagttcttcggccccggcaccagactgaccgtgctg

SEQ ID NO: 3575 - protein, 23 aa, Homo sapiens
IFIITEYMANGSLLNYLREMRHR

SEQ ID NO: 3576 - protein, 8 aa, Homo sapiens
ANGSLLNY

SEQ ID NO: 3577 - protein, 9 aa, Homo sapiens
ANGSLLNYL

SEQ ID NO: 3578 - protein, 9 aa, Homo sapiens
ANGSLLNYL

SEQ ID NO: 3579 - protein, 9 aa, Homo sapiens
ANGSLLNYL

SEQ ID NO: 3580 - protein, 9 aa, Homo sapiens
ANGSLLNYL

SEQ ID NO: 3581 - protein, 9 aa, Homo sapiens
ANGSLLNYL

SEQ ID NO: 3582 - protein, 9 aa, Homo sapiens
ANGSLLNYL

SEQ ID NO: 3583 - protein, 9 aa, Homo sapiens
ANGSLLNYL

SEQ ID NO: 3584 - protein, 9 aa, Homo sapiens
ANGSLLNYL

SEQ ID NO: 3585 - protein, 10 aa, Homo sapiens
ANGSLLNYLR

SEQ ID NO: 3586 - protein, 10 aa, Homo sapiens
ANGSLLNYLR

SEQ ID NO: 3587 - protein, 8 aa, Homo sapiens
EYMANGSL

SEQ ID NO: 3588 - protein, 8 aa, Homo sapiens
EYMANGSL

SEQ ID NO: 3589 - protein, 8 aa, Homo sapiens
EYMANGSL

SEQ ID NO: 3590 - protein, 9 aa, Homo sapiens
EYMANGSLL

SEQ ID NO: 3591 - protein, 9 aa, Homo sapiens
EYMANGSLL

SEQ ID NO: 3592 - protein, 9 aa, Homo sapiens
EYMANGSLL

SEQ ID NO: 3593 - protein, 9 aa, Homo sapiens
EYMANGSLL

SEQ ID NO: 3594 - protein, 9 aa, Homo sapiens
EYMANGSLL

SEQ ID NO: 3595 - protein, 9 aa, Homo sapiens
EYMANGSLL

SEQ ID NO: 3596 - protein, 9 aa, Homo sapiens
EYMANGSLL

SEQ ID NO: 3597 - protein, 9 aa, Homo sapiens
EYMANGSLL

SEQ ID NO: 3598 - protein, 10 aa, Homo sapiens
EYMANGSLLN

SEQ ID NO: 3599 - protein, 10 aa, Homo sapiens
EYMANGSLLN

SEQ ID NO: 3600 - protein, 11 aa, Homo sapiens
EYMANGSLLNY

SEQ ID NO: 3601 - protein, 8 aa, Homo sapiens
GSLLNYLR

SEQ ID NO: 3602 - protein, 8 aa, Homo sapiens
GSLLNYLR

SEQ ID NO: 3603 - protein, 10 aa, Homo sapiens
GSLLNYLREM

SEQ ID NO: 3604 - protein, 10 aa, Homo sapiens
GSLLNYLREM

SEQ ID NO: 3605 - protein, 9 aa, Homo sapiens
ITEYMANGS

SEQ ID NO: 3606 - protein, 10 aa, Homo sapiens
ITEYMANGSL

SEQ ID NO: 3607 - protein, 11 aa, Homo sapiens
ITEYMANGSLL

SEQ ID NO: 3608 - protein, 9 aa, Homo sapiens
MANGSLLNY

SEQ ID NO: 3609 - protein, 9 aa, Homo sapiens
MANGSLLNY

SEQ ID NO: 3610 - protein, 9 aa, Homo sapiens
MANGSLLNY

SEQ ID NO: 3611 - protein, 9 aa, Homo sapiens
MANGSLLNY

SEQ ID NO: 3612 - protein, 9 aa, Homo sapiens
MANGSLLNY

SEQ ID NO: 3613 - protein, 9 aa, Homo sapiens
MANGSLLNY

SEQ ID NO: 3614 - protein, 9 aa, Homo sapiens
MANGSLLNY

SEQ ID NO: 3615 - protein, 9 aa, Homo sapiens
MANGSLLNY

SEQ ID NO: 3616 - protein, 9 aa, Homo sapiens
MANGSLLNY

SEQ ID NO: 3617 - protein, 9 aa, Homo sapiens
MANGSLLNY

SEQ ID NO: 3618 - protein, 9 aa, Homo sapiens
MANGSLLNY

SEQ ID NO: 3619 - protein, 9 aa, Homo sapiens
MANGSLLNY

SEQ ID NO: 3620 - protein, 9 aa, Homo sapiens
MANGSLLNY

SEQ ID NO: 3621 - protein, 9 aa, Homo sapiens
MANGSLLNY

SEQ ID NO: 3622 - protein, 9 aa, Homo sapiens
MANGSLLNY

SEQ ID NO: 3623 - protein, 9 aa, Homo sapiens
MANGSLLNY

SEQ ID NO: 3624 - protein, 9 aa, Homo sapiens
MANGSLLNY

SEQ ID NO: 3625 - protein, 9 aa, Homo sapiens
MANGSLLNY

SEQ ID NO: 3626 - protein, 9 aa, Homo sapiens
MANGSLLNY

SEQ ID NO: 3627 - protein, 9 aa, Homo sapiens
MANGSLLNY

SEQ ID NO: 3628 - protein, 9 aa, Homo sapiens
MANGSLLNY

SEQ ID NO: 3629 - protein, 10 aa, Homo sapiens
MANGSLLNYL

SEQ ID NO: 3630 - protein, 10 aa, Homo sapiens
MANGSLLNYL

SEQ ID NO: 3631 - protein, 10 aa, Homo sapiens
MANGSLLNYL

SEQ ID NO: 3632 - protein, 10 aa, Homo sapiens
MANGSLLNYL

SEQ ID NO: 3633 - protein, 10 aa, Homo sapiens
MANGSLLNYL

SEQ ID NO: 3634 - protein, 10 aa, Homo sapiens
MANGSLLNYL

SEQ ID NO: 3635 - protein, 10 aa, Homo sapiens
MANGSLLNYL

SEQ ID NO: 3636 - protein, 10 aa, Homo sapiens
MANGSLLNYL

SEQ ID NO: 3637 - protein, 10 aa, Homo sapiens
MANGSLLNYL

SEQ ID NO: 3638 - protein, 10 aa, Homo sapiens
MANGSLLNYL

SEQ ID NO: 3639 - protein, 11 aa, Homo sapiens
MANGSLLNYLR

SEQ ID NO: 3640 - protein, 11 aa, Homo sapiens
MANGSLLNYLR

SEQ ID NO: 3641 - protein, 8 aa, Homo sapiens
NGSLLNYL

SEQ ID NO: 3642 - protein, 9 aa, Homo sapiens
NGSLLNYLR

SEQ ID NO: 3643 - protein, 9 aa, Homo sapiens
NGSLLNYLR

SEQ ID NO: 3644 - protein, 9 aa, Homo sapiens
NGSLLNYLR

SEQ ID NO: 3645 - protein, 9 aa, Homo sapiens
NGSLLNYLR

SEQ ID NO: 3646 - protein, 9 aa, Homo sapiens
SLLNYLREM

SEQ ID NO: 3647 - protein, 9 aa, Homo sapiens
SLLNYLREM

SEQ ID NO: 3648 - protein, 9 aa, Homo sapiens
SLLNYLREM

SEQ ID NO: 3649 - protein, 9 aa, Homo sapiens
SLLNYLREM

SEQ ID NO: 3650 - protein, 9 aa, Homo sapiens
SLLNYLREM

SEQ ID NO: 3651 - protein, 9 aa, Homo sapiens
SLLNYLREM

SEQ ID NO: 3652 - protein, 9 aa, Homo sapiens
SLLNYLREM

SEQ ID NO: 3653 - protein, 9 aa, Homo sapiens
SLLNYLREM

SEQ ID NO: 3654 - protein, 9 aa, Homo sapiens
SLLNYLREM

SEQ ID NO: 3655 - protein, 9 aa, Homo sapiens
SLLNYLREM

SEQ ID NO: 3656 - protein, 9 aa, Homo sapiens
SLLNYLREM

SEQ ID NO: 3657 - protein, 9 aa, Homo sapiens
SLLNYLREM

SEQ ID NO: 3658 - protein, 9 aa, Homo sapiens
SLLNYLREM

SEQ ID NO: 3659 - protein, 9 aa, Homo sapiens
SLLNYLREM

SEQ ID NO: 3660 - protein, 9 aa, Homo sapiens
SLLNYLREM

SEQ ID NO: 3661 - protein, 9 aa, Homo sapiens
SLLNYLREM

SEQ ID NO: 3662 - protein, 9 aa, Homo sapiens
SLLNYLREM

SEQ ID NO: 3663 - protein, 9 aa, Homo sapiens
SLLNYLREM

SEQ ID NO: 3664 - protein, 9 aa, Homo sapiens
SLLNYLREM

SEQ ID NO: 3665 - protein, 10 aa, Homo sapiens
SLLNYLREMR

SEQ ID NO: 3666 - protein, 10 aa, Homo sapiens
SLLNYLREMR

SEQ ID NO: 3667 - protein, 9 aa, Homo sapiens
TEYMANGSL

SEQ ID NO: 3668 - protein, 9 aa, Homo sapiens
TEYMANGSL

SEQ ID NO: 3669 - protein, 9 aa, Homo sapiens
TEYMANGSL

SEQ ID NO: 3670 - protein, 9 aa, Homo sapiens
TEYMANGSL

SEQ ID NO: 3671 - protein, 9 aa, Homo sapiens
TEYMANGSL

SEQ ID NO: 3672 - protein, 9 aa, Homo sapiens
TEYMANGSL

SEQ ID NO: 3673 - protein, 9 aa, Homo sapiens
TEYMANGSL

SEQ ID NO: 3674 - protein, 9 aa, Homo sapiens
TEYMANGSL

SEQ ID NO: 3675 - protein, 9 aa, Homo sapiens
TEYMANGSL

SEQ ID NO: 3676 - protein, 9 aa, Homo sapiens
TEYMANGSL

SEQ ID NO: 3677 - protein, 9 aa, Homo sapiens
TEYMANGSL

SEQ ID NO: 3678 - protein, 10 aa, Homo sapiens
TEYMANGSLL

SEQ ID NO: 3679 - protein, 10 aa, Homo sapiens
TEYMANGSLL

SEQ ID NO: 3680 - protein, 10 aa, Homo sapiens
TEYMANGSLL

SEQ ID NO: 3681 - protein, 10 aa, Homo sapiens
TEYMANGSLL

SEQ ID NO: 3682 - protein, 10 aa, Homo sapiens
TEYMANGSLL

SEQ ID NO: 3683 - protein, 12 aa, Homo sapiens
TEYMANGSLLNY

SEQ ID NO: 3684 - protein, 8 aa, Homo sapiens
YMANGSLL

SEQ ID NO: 3685 - protein, 8 aa, Homo sapiens
YMANGSLL

SEQ ID NO: 3686 - protein, 8 aa, Homo sapiens
YMANGSLL

SEQ ID NO: 3687 - protein, 8 aa, Homo sapiens
YMANGSLL

SEQ ID NO: 3688 - protein, 8 aa, Homo sapiens
YMANGSLL

SEQ ID NO: 3689 - protein, 8 aa, Homo sapiens
YMANGSLL

SEQ ID NO: 3690 - protein, 8 aa, Homo sapiens
YMANGSLL

SEQ ID NO: 3691 - protein, 8 aa, Homo sapiens
YMANGSLL

SEQ ID NO: 3692 - protein, 8 aa, Homo sapiens
YMANGSLL

SEQ ID NO: 3693 - protein, 8 aa, Homo sapiens
YMANGSLL

SEQ ID NO: 3694 - protein, 9 aa, Homo sapiens
YMANGSLLN

SEQ ID NO: 3695 - protein, 9 aa, Homo sapiens
YMANGSLLN

SEQ ID NO: 3696 - protein, 10 aa, Homo sapiens
YMANGSLLNY

SEQ ID NO: 3697 - protein, 10 aa, Homo sapiens
YMANGSLLNY

SEQ ID NO: 3698 - protein, 10 aa, Homo sapiens
YMANGSLLNY

SEQ ID NO: 3699 - protein, 10 aa, Homo sapiens
YMANGSLLNY

SEQ ID NO: 3700 - protein, 10 aa, Homo sapiens
YMANGSLLNY

SEQ ID NO: 3701 - protein, 10 aa, Homo sapiens
YMANGSLLNY

SEQ ID NO: 3702 - protein, 10 aa, Homo sapiens
YMANGSLLNY

SEQ ID NO: 3703 - protein, 10 aa, Homo sapiens
YMANGSLLNY

SEQ ID NO: 3704 - protein, 10 aa, Homo sapiens
YMANGSLLNY

SEQ ID NO: 3705 - protein, 10 aa, Homo sapiens
YMANGSLLNY

SEQ ID NO: 3706 - protein, 10 aa, Homo sapiens
YMANGSLLNY

SEQ ID NO: 3707 - protein, 9 aa, Homo sapiens
MANGSLLNY

SEQ ID NO: 3708 - protein, 9 aa, Homo sapiens
MANGSLLNY

SEQ ID NO: 3709 - protein, 10 aa, Homo sapiens
YMANGSLLNY

SEQ ID NO: 3710 - protein, 9 aa, Homo sapiens
MANGSLLNY

SEQ ID NO: 3711 - protein, 10 aa, Homo sapiens
YMANGSLLNY

SEQ ID NO: 3712 - protein, 9 aa, Homo sapiens
EYMANGSLL

SEQ ID NO: 3713 - protein, 9 aa, Homo sapiens
SLLNYLREM

SEQ ID NO: 3714 - protein, 10 aa, Homo sapiens
MANGSLLNYL

SEQ ID NO: 3715 - protein, 9 aa, Homo sapiens
YMANGSLLN

SEQ ID NO: 3716 - protein, 9 aa, Homo sapiens
SLLNYLREM

SEQ ID NO: 3717 - protein, 10 aa, Homo sapiens
MANGSLLNYL

SEQ ID NO: 3718 - protein, 9 aa, Homo sapiens
SLLNYLREM

SEQ ID NO: 3719 - protein, 10 aa, Homo sapiens
MANGSLLNYL

SEQ ID NO: 3720 - protein, 8 aa, Homo sapiens
LIMQLMPF

SEQ ID NO: 3721 - protein, 9 aa, Homo sapiens
LTSTVQLIM

SEQ ID NO: 3722 - protein, 9 aa, Homo sapiens
QLIMQLMPF

SEQ ID NO: 3723 - protein, 9 aa, Homo sapiens
STVQLIMQL

SEQ ID NO: 3724 - protein, 10 aa, Homo sapiens
STVQLIMQLM

SEQ ID NO: 3725 - protein, 10 aa, Homo sapiens
TSTVQLIMQL

SEQ ID NO: 3726 - protein, 8 aa, Homo sapiens
TVQLIMQL

SEQ ID NO: 3727 - protein, 9 aa, Homo sapiens
TVQLIMQLM

SEQ ID NO: 3728 - protein, 8 aa, Homo sapiens
VQLIMQLM

SEQ ID NO: 3729 - protein, 9 aa, Homo sapiens
LTSTVQLIM

SEQ ID NO: 3730 - protein, 10 aa, Homo sapiens
CLTSTVQLIM

SEQ ID NO: 3731 - protein, 10 aa, Homo sapiens
MQLMPFGCLL

SEQ ID NO: 3732 - protein, 9 aa, Homo sapiens
MQLMPFGCL

SEQ ID NO: 3733 - protein, 10 aa, Homo sapiens
LIMQLMPFGC

SEQ ID NO: 3734 - protein, 9 aa, Homo sapiens
QLIMQLMPF

SEQ ID NO: 3735 - protein, 10 aa, Homo sapiens
CLTSTVQLIM

SEQ ID NO: 3736 - protein, 10 aa, Homo sapiens
IMQLMPFGCL

SEQ ID NO: 3737 - protein, 9 aa, Homo sapiens
IMQLMPFGC

SEQ ID NO: 3738 - protein, 9 aa, Homo sapiens
LIMQLMPFG

SEQ ID NO: 3739 - protein, 10 aa, Homo sapiens
VQLIMQLMPF

SEQ ID NO: 3740 - protein, 10 aa, Homo sapiens
QLIMQLMPFG

SEQ ID NO: 3741 - protein, 9 aa, Homo sapiens
STVQLIMQL

SEQ ID NO: 3742 - protein, 9 aa, Homo sapiens
QLIMQLMPF

SEQ ID NO: 3743 - protein, 10 aa, Homo sapiens
VQLIMQLMPF

SEQ ID NO: 3744 - protein, 10 aa, Homo sapiens
IMQLMPFGCL

SEQ ID NO: 3745 - protein, 10 aa, Homo sapiens
MQLMPFGCLL

SEQ ID NO: 3746 - protein, 9 aa, Homo sapiens
MQLMPFGCL

SEQ ID NO: 3747 - protein, 9 aa, Homo sapiens
QLIMQLMPF

SEQ ID NO: 3748 - protein, 10 aa, Homo sapiens
IMQLMPFGCL

SEQ ID NO: 3749 - protein, 9 aa, Homo sapiens
MQLMPFGCL

SEQ ID NO: 3750 - protein, 10 aa, Homo sapiens
MQLMPFGCLL

SEQ ID NO: 3751 - protein, 10 aa, Homo sapiens
VQLIMQLMPF

SEQ ID NO: 3752 - protein, 9 aa, Homo sapiens
QLIMQLMPF

SEQ ID NO: 3753 - protein, 10 aa, Homo sapiens
TLQRSSLWCL

SEQ ID NO: 3754 - protein, 9 aa, Homo sapiens
VLPEPHLAL

SEQ ID NO: 3755 - protein, 10 aa, Homo sapiens
HVLPEPHLAL

SEQ ID NO: 3756 - protein, 9 aa, Homo sapiens
ALQPLQPHA

SEQ ID NO: 3757 - protein, 9 aa, Homo sapiens
AIQPVLWTT

SEQ ID NO: 3758 - protein, 11 aa, Homo sapiens
APAIQPVLWTT

SEQ ID NO: 3759 - protein, 10 aa, Homo sapiens
SMLTGPPARV

SEQ ID NO: 3760 - protein, 9 aa, Homo sapiens
MLTGPPARV

SEQ ID NO: 3761 - protein, 10 aa, Homo sapiens
YMFLKAESKI

SEQ ID NO: 3762 - protein, 9 aa, Homo sapiens
MFLKAESKI

SEQ ID NO: 3763 - protein, 10 aa, Homo sapiens
YMFLKAESKI

SEQ ID NO: 3764 - protein, 10 aa, Homo sapiens
VLWTTPPLQH

SEQ ID NO: 3765 - protein, 9 aa, Homo sapiens
YMFLKAESK

SEQ ID NO: 3766 - protein, 9 aa, Homo sapiens
KIMFATLQR

SEQ ID NO: 3767 - protein, 9 aa, Homo sapiens
FATLQRSSL

SEQ ID NO: 3768 - protein, 9 aa, Homo sapiens
EPHLALQPL

SEQ ID NO: 3769 - protein, 10 aa, Homo sapiens
QPVLWTTPPL

SEQ ID NO: 3770 - protein, 9 aa, Homo sapiens
GPPARVPAV

SEQ ID NO: 3771 - protein, 10 aa, Homo sapiens
MFATLQRSSL

SEQ ID NO: 3772 - protein, 9 aa, Homo sapiens
KPKRDGYMF

SEQ ID NO: 3773 - protein, 10 aa, Homo sapiens
KPKRDGYMFL

SEQ ID NO: 3774 - protein, 10 aa, Homo sapiens
IMKPKRDGYM

SEQ ID NO: 3775 - protein, 10 aa, Homo sapiens
MFATLQRSSL

SEQ ID NO: 3776 - protein, 10 aa, Homo sapiens
FLKAESKIMF

SEQ ID NO: 3777 - protein, 9 aa, Homo sapiens
LHFCRSSIM

SEQ ID NO: 3778 - protein, 9 aa, Homo sapiens
EPHLALQPL

SEQ ID NO: 3779 - protein, 9 aa, Homo sapiens
FATLQRSSL

SEQ ID NO: 3780 - protein, 9 aa, Homo sapiens
ESKIMFATL

SEQ ID NO: 3781 - protein, 9 aa, Homo sapiens
FLKAESKIM

SEQ ID NO: 3782 - protein, 10 aa, Homo sapiens
YMFLKAESKI

SEQ ID NO: 3783 - protein, 10 aa, Homo sapiens
TLQRSSLWCL

SEQ ID NO: 3784 - protein, 9 aa, Homo sapiens
VLPEPHLAL

SEQ ID NO: 3785 - protein, 10 aa, Homo sapiens
HVLPEPHLAL

SEQ ID NO: 3786 - protein, 9 aa, Homo sapiens
ALQPLQPHA

SEQ ID NO: 3787 - protein, 9 aa, Homo sapiens
AIQPVLWTT

SEQ ID NO: 3788 - protein, 11 aa, Homo sapiens
APAIQPVLWTT

SEQ ID NO: 3789 - protein, 10 aa, Homo sapiens
SMLTGPPARV

SEQ ID NO: 3790 - protein, 9 aa, Homo sapiens
MLTGPPARV

SEQ ID NO: 3791 - protein, 10 aa, Homo sapiens
YMFLKAESKI

SEQ ID NO: 3792 - protein, 9 aa, Homo sapiens
MFLKAESKI

SEQ ID NO: 3793 - protein, 10 aa, Homo sapiens
YMFLKAESKI

SEQ ID NO: 3794 - protein, 10 aa, Homo sapiens
VLWTTPPLQH

SEQ ID NO: 3795 - protein, 9 aa, Homo sapiens
YMFLKAESK

SEQ ID NO: 3796 - protein, 9 aa, Homo sapiens
KIMFATLQR

SEQ ID NO: 3797 - protein, 9 aa, Homo sapiens
FATLQRSSL

SEQ ID NO: 3798 - protein, 9 aa, Homo sapiens
EPHLALQPL

SEQ ID NO: 3799 - protein, 10 aa, Homo sapiens
QPVLWTTPPL

SEQ ID NO: 3800 - protein, 9 aa, Homo sapiens
GPPARVPAV

SEQ ID NO: 3801 - protein, 10 aa, Homo sapiens
MFATLQRSSL

SEQ ID NO: 3802 - protein, 9 aa, Homo sapiens
KPKRDGYMF

SEQ ID NO: 3803 - protein, 10 aa, Homo sapiens
KPKRDGYMFL

SEQ ID NO: 3804 - protein, 10 aa, Homo sapiens
IMKPKRDGYM

SEQ ID NO: 3805 - protein, 10 aa, Homo sapiens
MFATLQRSSL

SEQ ID NO: 3806 - protein, 10 aa, Homo sapiens
FLKAESKIMF

SEQ ID NO: 3807 - protein, 9 aa, Homo sapiens
LHFCRSSIM

SEQ ID NO: 3808 - protein, 9 aa, Homo sapiens
EPHLALQPL

SEQ ID NO: 3809 - protein, 9 aa, Homo sapiens
FATLQRSSL

SEQ ID NO: 3810 - protein, 9 aa, Homo sapiens
ESKIMFATL

SEQ ID NO: 3811 - protein, 9 aa, Homo sapiens
FLKAESKIM

SEQ ID NO: 3812 - protein, 10 aa, Homo sapiens
YMFLKAESKI

SEQ ID NO: 3813 - protein, 14 aa, Homo sapiens
ESKIMFATLQRSSL

SEQ ID NO: 3814 - protein, 16 aa, Homo sapiens
KPKRDGYMFLKAESKI

SEQ ID NO: 3815 - protein, 18 aa, Homo sapiens
SMLTGPPARVPAVPFDLH

SEQ ID NO: 3816 - protein, 21 aa, Homo sapiens
EPCSMLTGPPARVPAVPFDLH

SEQ ID NO: 3817 - protein, 25 aa, Homo sapiens
LHFCRSSIMKPKRDGYMFLKAESKI

SEQ ID NO: 3818 - protein, 26 aa, Homo sapiens
GPPARVPAVPFDLHFCRSSIMKPKRD

SEQ ID NO: 3819 - protein, 33 aa, Homo sapiens; identical to SEQ ID NO: 71

SEQ ID NO: 3820 - protein, 15 aa, Homo sapiens
GGAATTAAGAGAAGC

SEQ ID NO: 3821 - protein, 5 aa, Homo sapiens
ELREA

SEQ ID NO: 3822 - protein, 5 aa, Homo sapiens
ELREA

SEQ ID NO: 3823 - protein, 4 aa, Homo sapiens
YVMA

SEQ ID NO: 3824 - protein, 9 aa, Homo sapiens
VLPEPHLAL

SEQ ID NO: 3825 - protein, 10 aa, Homo sapiens
SMLTGPPARV

SEQ ID NO: 3826 - protein, 9 aa, Homo sapiens
MLTGPPARV

SEQ ID NO: 3827 - protein, 9 aa, Homo sapiens
KPKRDGYMF

SEQ ID NO: 3828 - protein, 10 aa, Homo sapiens
KPKRDGYMFL

SEQ ID NO: 3829 - protein, 9 aa, Homo sapiens
ESKIMFATL

SEQ ID NO: 3830 - protein, 201 aa, Artificial Sequence; identical to SEQ ID NO: 1
  Description of Artificial Sequence: Synthetic polypeptide

SEQ ID NO: 3831 - protein, 201 aa, Artificial Sequence; identical to SEQ ID NO: 1
  Description of Artificial Sequence: Synthetic polypeptide

SEQ ID NO: 3832 - protein, 201 aa, Artificial Sequence; identical to SEQ ID NO: 1
  Description of Artificial Sequence: Synthetic polypeptide

SEQ ID NO: 3833 - protein, 110 aa, Homo sapiens
PGRPLQTHVLPEPHLALQPLQPHADHADAPAIQPVLWTTPPLQHHRHGLEPCSMLTGPPARVPAVPFDLHFCRSSIMKPKRDGYMFLKAESKIMFATLQRSSLWCLCSNH

SEQ ID NO: 3834 - protein, 9 aa, Homo sapiens
MLTGPPARV

SEQ ID NO: 3835 - protein, 10 aa, Homo sapiens
SMLTGPPARV

SEQ ID NO: 3836 - protein, 10 aa, Homo sapiens
SMLTGPPARV

SEQ ID NO: 3837 - protein, 9 aa, Homo sapiens
MLTGPPARV

SEQ ID NO: 3838 - protein, 9 aa, Homo sapiens
KIMFATLQR

SEQ ID NO: 3839 - protein, 9 aa, Homo sapiens
KIMFATLQR

SEQ ID NO: 3840 - protein, 10 aa, Homo sapiens
KPKRDGYMFL

SEQ ID NO: 3841 - protein, 9 aa, Homo sapiens
KPKRDGYMF

SEQ ID NO: 3842 - protein, 9 aa, Homo sapiens
ESKIMFATL

SEQ ID NO: 3843 - protein, 33 aa, Homo sapiens; identical to SEQ ID NO: 71

SEQ ID NO: 3844 - protein, 9 aa, Homo sapiens
KPKRDGYMF

SEQ ID NO: 3845 - protein, 10 aa, Homo sapiens
KPKRDGYMFL

SEQ ID NO: 3846 - protein, 18 aa, Homo sapiens
SMLTGPPARVPAVPFDLH

SEQ ID NO: 3847 - protein, 10 aa, Homo sapiens
SMLTGPPARV

SEQ ID NO: 3848 - protein, 9 aa, Homo sapiens
MLTGPPARV

SEQ ID NO: 3849 - DNA, 600 bp, Homo sapiens
cgaaggctgtctgcagccaggagagcagggacgtcctgtgcgaactgtcagaccaccacaaccacactctggaggaggaatgccaatggggaccctgtctgcaatgcctgtgggctctactacaagcttcacaatattaacagacccctgactatgaagaaggaaggcatccagaccagaaaccgaaaaatgtctagcaaatccaaaaagtgcaaaaaagtgcatgactcactggaggacttccccaagaacagctcgtttcccggccgccctctccagacacatgtcctccctgagccacatctcgcccttcagccactccagccacatgctgaccacgcccacgccgatgcacccgccatccagcctgtcctttggaccacaccacccctccagcatggtcaccgccatgggttagagccctgctcgatgctcacagggcccccagcgagagtccctgcagtccctttcgacttgcatttttgcaggagcagtatcatgaagcctaaacgcgatggatatatgtttttgaaggcagaaagcaaaattatgtttgccactttgcaaaggagctcactgtggtgtctgtgttccaaccac

SEQ ID NO: 3850 - DNA, 602 bp, Homo sapiens
cgaaggctgtctgcagccaggagagcagggacgtcctgtgcgaactgtcagaccaccacaaccacactctggaggaggaatgccaatggggaccctgtctgcaatgcctgtgggctctactacaagcttcacaatattaacagacccctgactatgaagaaggaaggcatccagaccagaaaccgaaaaatgtctagcaaatccaaaaagtgcaaaaaagtgcatgactcactggaggacttccccaagaacagctcgtttaacccggccgccctctccagacacatgtcctccctgagccacatctcgcccttcagccactccagccacatgctgaccacgcccacgccgatgcacccgccatccagcctgtcctttggaccacaccacccctccagcatggtcaccgccatgggttagagccctgctcgatgctcacagggcccccagcgagagtccctgcagtccctttcgacttgcatttttgcaggagcagtatcatgaagcctaaacgcgatggatatatgtttttgaaggcagaaagcaaaattatgtttgccactttgcaaaggagctcactgtggtgtctgtgttccaaccac

SEQ ID NO: 3851 - protein, 197 aa, Homo sapiens
RRLSAARRAGTSCANCQTTTTTLWRRNANGDPVCNACGLYYKLHNINRPLTMKKEGIQTRNRKMSSKSKKCKKVHDSLEDFPKNSSFNPAALSRHMSSLSHISPFSHSSHMLTTPTPMHPPSSLSFGPHHPSSMVTAMGSPARCSQGPQRESLQSLSTCIFAGAVSSLNAMDICFRQKAKLCLPLCKGAHCGVCVPT

SEQ ID NO: 3852 - protein, 200 aa, Homo sapiens
RRLSAARRAGTSCANCQTTTTTLWRRNANGDPVCNACGLYYKLHNINRPLTMKKEGIQTRNRKMSSKSKKCKKVHDSLEDFPKNSSFPGRPLQTHVLPEPHLALQPLQPHADHAHADAPAIQPVLWTTPPLQHGHRHGLEPCSMLTGPPARVPAVPFDLHFCRSSIMKPKRDGYMFLKAESKIMFATLQRSSLWCLCSNH

SEQ ID NO: 3853 - protein, 201 aa, Artificial Sequence
  Description of Artificial Sequence: Synthetic polypeptide
  MISC_FEATURE (104)..(105): May or may not be present
  MISC_FEATURE (137)..(137): May or may not be present
  MOD_RES (140)..(140): Met or Leu
  MOD_RES (167)..(167): Val or Ile
  MOD_RES (185)..(185): Leu or Met
  MISC_FEATURE (200)..(201): May or may not be present
RRLSAARRAGTSCANCQTTTTTLWRRNANGDPVCNACGLYYKLHNINRPLTMKKEGIQTRNRKMSSKSKKCKKVHDSLEDFPKNSSFNGAALQRHMLPEPHIALQPLQHHADHAHADAPAHQPSLLSFGPHQHGHRVHAXEPCARCSQGPAREPAQPLDLCICAGAXMKLNADDICFRQAAKLCXFACLQAHCGWCLCSNH

SEQ ID NO: 3854 - DNA, 624 bp, Homo sapiens
gaattcgacgccaccatgagaaggctgagcgccgctagaagagccggcaccagctgcgccaactgccagaccaccaccaccaccctgtggagaaggaacgccaacggcgatcccgtgtgtaacgcctgcggcctgtactacaagctgcacaacatcaacaggcccctgaccatgaagaaggagggcatccagaccaggaacaggaagatgtccagcaagagcaagaagtgcaagaaggtgcacgacagcctggaggacttccccaagaacagcagcttccccggaagacccctgcagacacacgtgctgcccgagcctcatctggccctgcagcctctccagccccatgccgatcatgcccacgccgatgcccctgccatccaacccgtgctgtggaccacccctcctctgcagcacggacacagacacggcctggagccctgtagcatgctgacaggacctcccgccagagtgcctgccgtgcctttcgacctgcacttctgcagaagcagcatcatgaagcccaagagggacggctatatgttcctgaaggccgagtccaagatcatgttcgccaccctgcagagaagctccctgtggtgcctgtgcagcaaccacggatcc

SEQ ID NO: 3855 - DNA, 759 bp, Artificial Sequence
  Description of Artificial Sequence: Synthetic polynucleotide
tgacgcaaatgggcggtaggcgtgtacggtgggaggtctatataagcagagcttctagagctagcgaattcgacgccaccatgagaaggctgagcgccgctagaagagccggcaccagctgcgccaactgccagaccaccaccaccaccctgtggagaaggaacgccaacggcgatcccgtgtgtaacgcctgcggcctgtactacaagctgcacaacatcaacaggcccctgaccatgaagaaggagggcatccagaccaggaacaggaagatgtccagcaagagcaagaagtgcaagaaggtgcacgacagcctggaggacttccccaagaacagcagcttccccggaagacccctgcagacacacgtgctgcccgagcctcatctggccctgcagcctctccagccccatgccgatcatgcccacgccgatgcccctgccatccaacccgtgctgtggaccacccctcctctgcagcacggacacagacacggcctggagccctgtagcatgctgacaggacctcccgccagagtgcctgccgtgcctttcgacctgcacttctgcagaagcagcatcatgaagcccaagagggacggctatatgttcctgaaggccgagtccaagatcatgttcgccaccctgcagagaagctccctgtggtgcctgtgcagcaaccacggatccgcggccgctgagggcagaggaagtcttctaacatgcggtgacgtggaggagaatcccggcccttccggga

SEQ ID NO: 3856 - DNA, 624 bp, Artificial Sequence; identical to SEQ ID NO: 3854
  Description of Artificial Sequence: Synthetic polynucleotide

SEQ ID NO: 3857 - protein, 113 aa, Homo sapiens; identical to SEQ ID NO: 2

SEQ ID NO: 3858 - protein, 10 aa, Homo sapiens
SMLTGPPARV

SEQ ID NO: 3859 - protein, 9 aa, Homo sapiens
MLTGPPARV

SEQ ID NO: 3860 - protein, 9 aa, Homo sapiens
KPKRDGYMF

SEQ ID NO: 3861 - protein, 10 aa, Homo sapiens
KPKRDGYMFL

SEQ ID NO: 3862 - protein, 9 aa, Homo sapiens
ESKIMFATL

SEQ ID NO: 3863 - protein, 9 aa, Homo sapiens
MLTGPPARV

SEQ ID NO: 3864 - protein, 9 aa, Homo sapiens
MLTGPPARV

SEQ ID NO: 3865 - DNA, 840 bp, Homo sapiens
acagatccaagctgtgaccggcgcctactctagagctagcgaattcgacgccaccatgggcattcgtctgctgtgtcgtgtggccttctgctttttagccgtgggtttagtggacgtgaaggtgacccagtcctctcgttatttagtgaagaggaccggcgagaaggtgtttttagaatgcgtgcaagatatggaccacgagaacatgttctggtacagacaagatcccggactgggtttaaggctgatctacttcagctacgacgtgaagatgaaggagaagggcgacatccccgagggctactccgtgtctcgtgagaagaaggagaggttctctttaattttagagtccgccagcaccaaccagaccagcatgtatttatgcgccagctctttagactttgtgctggccggcagctacagctacaacgagcagttcttcggccccggcaccagactgaccgtgctggaggacctgaacaaggtctttcctcccgaagtggccgtgtttgagcccagcgaggccgagatcagccatacccagaaggccacactcgtgtgcctggccaccggcttctttcccgaccatgtggagctgagctggtgggtgaacggcaaggaggtccactccggagtcagcaccgatccccagcctctcaaagagcagcccgctctcaacgactccaggtattgcctgtccagcaggctgagagtcagcgccaccttttggcagaatcccaggaaccacttcaggtgccaggtccagttctatggcctgagcgagaacgacgagtgacacaggatagagctaagcccgtgacccagattgtcagcgccgag

SEQ ID NO: 3866 - DNA, 1035 bp, Homo sapiens
atgggcattcgtctgctgtgtcgtgtggccttctgctttttagccgtgggtttagtggacgtgaaggtgacccagtcctctcgttatttagtgaagaggaccggcgagaaggtgtttttagaatgcgtgcaagatatggaccacgagaacatgttctggtacagacaagatcccggactgggtttaaggctgatctacttcagctacgacgtgaagatgaaggagaagggcgacatccccgagggctactccgtgtctcgtgagaagaaggagaggttctctttaattttagagtccgccagcaccaaccagaccagcatgtatttatgcgccagctctttagactttgtgctggccggcagctacagctacaacgagcagttcttcggccccggcaccagactgaccgtgctggaggacctgaacaaggtctttcctcccgaagtggccgtgtttgagcccagcgaggccgagatcagccatacccagaaggccacactcgtgtgcctggccaccggcttctttcccgaccatgtggagctgagctggtgggtgaacggcaaggaggtccactccggagtcagcaccgatccccagcctctcaaagagcagcccgctctcaacgactccaggtattgcctgtccagcaggctgagagtcagcgccaccttttggcagaatcccaggaaccacttcaggtgccaggtccagttctatggcctgagcgagaacgacgagtggacacaggatagagctaagcccgtgacccagattgtcagcgccgaggcctggggcagagccgactgtggattcacaagcgtgtcctatcagcaaggcgtgctcagcgccaccattctgtacgagatcctgctgggcaaagccaccctgtacgctgtgctggtgtccgctctggtgctgatggctatggtcaagaggaaggactttcggatcaggcgcagcggaagcggagtgaagcaaaccctcaacttcgacctgctcaagctggccggagatgtggaaagcaatcccggaccc

SEQ ID NO: 3867 - DNA, 267 bp, Homo sapiens
cagattgtcagcgccgaggcctggggcagagccgactgtggattcacaagcgtgtcctatcagcaaggcgtgctcagcgccaccattctgtacgagatcctgctgggcaaagccaccctgtacgctgtgctggtgtccgctctggtgctgatggctatggtcaagaggaaggactttcggatcaggcgcagcggaagcggagtgaagcaaaccctcaacttcgacctgctcaagctggccggagatgtggaaagcaatcccggaccc

SEQ ID NO: 3868 - DNA, 1034 bp, Artificial Sequence
  Description of Artificial Sequence: Synthetic polynucleotide
atgggcattcgtctgctgtgtcgtgtggccttctgctttttagccgtgggtttagtggacgtgaaggtgacccagtcctctcgttatttagtgaagaggaccggcgagaaggtgtttttagaatgcgtgcaagatatggaccacgagaacatgttctggtacagacaagatcccggactgggtttaaggctgatctacttcagctacgacgtgaagatgaaggagaagggcgacatccccgagggctactccgtgtctcgtgagaagaaggagaggttctctttaattttagagtccgccagcaccaaccagaccagcatgtatttatgcgccagctctttagactttgtgctggccggcagctacagctacaacgagcagttcttcggccccggcaccagactgaccgtgctggaggacctgaacaaggtctttcctcccgaagtggccgtgtttgagcccagcgaggccgagatcagccatacccagaaggccacactcgtgtgcctggccaccggcttctttcccgaccatgtggagctgagctggtgggtgaacggcaaggaggtccactccggagtcagcaccgatccccagcctctcaaagagcagcccgctctcaacgactccaggtattgcctgtccagcaggctgagagtcagcgccaccttttggcagaatcccaggaaccacttcaggtgccaggtccagttctatggcctgagcgagaacgacgagtgacacaggatagagctaagcccgtgacccagattgtcagcgccgaggcctggggcagagccgactgtggattcacaagcgtgtcctatcagcaaggcgtgctcagcgccaccattctgtacgagatcctgctgggcaaagccaccctgtacgctgtgctggtgtccgctctggtgctgatggctatggtcaagaggaaggactttcggatcaggcgcagcggaagcggagtgaagcaaaccctcaacttcgacctgctcaagctggccggagatgtggaaagcaatcccggaccc

SEQ ID NO: 3869 - DNA, 878 bp, Homo sapiens
tttaggcggcgtgctgctgattttatggctgcaagttgactgggtgaagagccagaagatcgagcagaacagcgaggctttaaacattcaagaaggcaagacagccactttaacttgtaactataccaactactcccccgcttatttacagtggtacagacaagatcccggcagaggccccgtgtttttactgctgattcgtgagaacgagaaggagaagaggaaggagagactgaaggtgaccttcgacaccactttaaagcagtctttattccacatcaccgccagccagcccgctgatagcgccacctatttatgcgctttagacatctacggcaacaatcgtctggccttcggcaagggcaaccaagttgtggtgatccccgatattcagaatcccgatcccgctgtgtaccagctgagggattccaagtcctccgataagtccgtctgtctgttcaccgacttcgatagccagaccaacgtgagccaaagcaaggactccgacgtgtatatcacagacaagaccgtgctggacatgaggagcatggacttcaagagcaatagcgccgtggcctggtccaataagagcgatttcgcctgcgccaacgccttcaacaatagcatcattcccgaggacaccttcttccccagccccgaaagcagctgcgatgtgaaactggtggagaagtcctttgagaccgacaccaacctcaacttccagaacctctccgtgatcggattcaggattctgctgctgaaggtggctggctttaacctgctgatgaccctcaggctgtggtccagctaaggatccgtcgacaatcaacctctggattacaaaatttgtgaaagattgactggtattcttaactatg

SEQ ID NO: 3870 - DNA, 876 bp, Homo sapiens
atggccttctggctgaggagactgggtttacacttcagaccccatttaggcagaagaatggagagctttttaggcggcgtgctgctgattttatggctgcaagttgactgggtgaagagccagaagatcgagcagaacagcgaggctttaaacattcaagaaggcaagacagccactttaacttgtaactataccaactactcccccgcttatttacagtggtacagacaagatcccggcagaggccccgtgtttttactgctgattcgtgagaacgagaaggagaagaggaaggagagactgaaggtgaccttcgacaccactttaaagcagtctttattccacatcaccgccagccagcccgctgatagcgccacctatttatgcgctttagacatctacggcaacaatcgtctggccttcggcaagggcaaccaagttgtggtgatccccgatattcagaatcccgatcccgctgtgtaccagctgagggattccaagtcctccgataagtccgtctgtctgttcaccgacttcgatagccagaccaacgtgagccaaagcaaggactccgacgtgtatatcacagacaagaccgtgctggacatgaggagcatggacttcaagagcaatagcgccgtggcctggtccaataagagcgatttcgcctgcgccaacgccttcaacaatagcatcattcccgaggacaccttcttccccagccccgaaagcagctgcgatgtgaaactggtggagaagtcctttgagaccgacaccaacctcaacttccagaacctctccgtgatcggattcaggattctgctgctgaaggtggctggctttaacctgctgatgaccctcaggctgtggtccagc

SEQ ID NO: 3871 - DNA, 613 bp, Homo sapiens
tgtggaaagcaatcccggacccatggccttctggctgaggagactgggtttacacttcagaccccatttaggcagaagaatggagagctttttaggcggcgtgctgctgattttatggctgcaagttgactgggtgaagagccagaagatcgagcagaacagcgaggctttaaacattcaagaaggcaagacagccactttaacttgtaactataccaactactcccccgcttatttacagtggtacagacaagatcccggcagaggccccgtgtttttactgctgattcgtgagaacgagaaggagaagaggaaggagagactgaaggtgaccttcgacaccactttaaagcagtctttattccacatcaccgccagccagcccgctgatagcgccacctatttatgcgctttagacatctacggcaacaatcgtctggccttcggcaagggcaaccaagttgtggtgatccccgatattcagaatcccgatcccgctgtgtaccagctgagggattccaagtcctccgataagtccgtctgtctgttcaccgacttcgatagccagaccaacgtgagccaaagcaaggactccgacgtgtatatcacagac

SEQ ID NO: 3872 - DNA, 876 bp, Artificial Sequence; identical to SEQ ID NO: 3870
  Description of Artificial Sequence: Synthetic polynucleotide

What is claimed is:

1. A pharmaceutical composition comprising:
(a) at least one polypeptide or a pharmaceutically acceptable salt thereof comprising a first mutant GATA3 peptide sequence and a second mutant GATA3 peptide sequence, wherein
(i) the first mutant GATA3 peptide sequence and the second mutant GATA3 peptide sequence each comprise at least 8 contiguous amino acids of SEQ ID NO: 1, and
(ii) a C-terminal sequence of the first mutant GATA3 peptide sequence overlaps with an N-terminal sequence of the second mutant GATA3 peptide sequence; wherein the at least 8 contiguous amino acids of SEQ ID NO: 1 comprises at least one amino acid of sequence PGRPLQTHVL PEPHLALQPLQPHADHAHADAPAIQPVLWTTPPLQHGHRHGLEPCSMLTGPPARVPAVP FDLHFCRSSIMKPKRDGYMFLKAESKIMFAT LQRSSLWCLCSNH (SEQ ID NO: 2); or
(b) at least one polynucleotide comprising a sequence encoding the at least one polypeptide.

2. The pharmaceutical composition of claim 1, wherein the first mutant GATA3 peptide sequence or the second mutant GATA3 peptide sequence comprises at least 8 contiguous amino acids of SEQ ID NO: 2.

3. The pharmaceutical composition of any one of claims 1-2, wherein the first mutant GATA3 peptide sequence and the second mutant peptide sequence comprises at least 8 contiguous amino acids of SEQ ID NO: 2.

4. The pharmaceutical composition of any one of claims 2-3, wherein the at least 8 contiguous amino acids of SEQ ID NO: 2 comprises at least 8 contiguous amino acids of sequence PGRPLQTHVL PEPHLALQPLQPHADHAHADAPAIQPVLWTTPPLQHGHRHGL (SEQ ID NO: 3).

5. The pharmaceutical composition of any one of claims 2-4, wherein the at least 8 contiguous amino acids of SEQ ID NO: 2 comprises at least one amino acid of sequence EPCSMLTGPP ARVPAVPFDLHFCRSSIMKPKRDGYMFLKAESKIMFATLQRSSLWCLCSNH (SEQ ID NO: 4).

6. The pharmaceutical composition of any one of claims 1-5, wherein at least one of the first mutant GATA3 peptide sequence and the second mutant GATA3 peptide sequence comprise at least 14 mutant amino acids.

7. The pharmaceutical composition of any one of claims 1-6, wherein the at least one polypeptide comprises at least 3 mutant GATA3 peptide sequences.

8. The pharmaceutical composition of any one of claims 1-7, wherein the at least one polypeptide comprises at least two polypeptides.

9. The pharmaceutical composition of any one of claims 1-8, wherein the at least one polypeptide further comprises a third mutant GATA3 peptide sequence, wherein the third mutant GATA3 peptide sequence comprises at least 8 contiguous amino acids of SEQ ID NO: 1, wherein the at least 8 contiguous amino acids of SEQ ID NO: 1 comprises at least one amino acid of sequence SEQ ID NO: 2

10. The pharmaceutical composition of claim 9, wherein the third GATA3 mutant peptide comprises at least 8 contiguous amino acids of SEQ ID NO: 2.

11. The pharmaceutical composition of any one of claims 1-10, wherein the at least one polypeptide comprises at least one mutant GATA3 peptide sequence that binds to or is predicted to bind to a protein encoded by an HLA-A02:01 allele, an HLA-A24:02 allele, an HLA-A03:01 allele, an HLA-B07:02 allele and/or an HLA-B08:01 allele.

12. The pharmaceutical composition of any one of claims 1-11, wherein the at least one polypeptide comprises at least one mutant GATA3 peptide sequence that binds to or is predicted to bind to a protein encoded by:
(a) an HLA-A02:01 allele and an HLA-A24:02 allele;
(b) an HLA-A02:01 allele and an HLA-B08:01 allele;
(c) an HLA-A24:02 allele and an HLA-B08:01 allele; or
(d) HLA-A02:01 allele, an HLA-A24:02 allele and an HLA-B08:01 allele.

13. The pharmaceutical composition of any one of claims 1-12, wherein,
(a) the first mutant GATA3 peptide sequence binds to or is predicted to bind to a protein encoded by an HLA-A02:01 allele, an HLA-A24:02 allele, an HLA-A03:01 allele, an HLA-B07:02 allele or an HLA-B08:01 allele; and
(b) the second GATA3 peptide sequence binds to or is predicted to bind to a protein encoded by an HLA-A02:01 allele, an HLA-A24:02 allele, an HLA-A03:01 allele, an HLA-B07:02 allele or an HLA-B08:01 allele; wherein the first mutant GATA3 peptide sequence binds to or is predicted to bind to a protein encoded by different HLA allele than the second mutant GATA3 peptide sequence.

14. The pharmaceutical composition of any one of claims 1-13, wherein at least one of the first mutant GATA3 peptide sequence and the second mutant GATA 3 peptide sequence binds to a protein encoded by an HLA allele with an affinity of less than 500 nM.

15. The pharmaceutical composition of any one of claims 1-14, wherein at least one of the first mutant GATA3 peptide sequence and the second mutant peptide sequence binds to a protein encoded by an HLA allele with a stability of greater than 1 hour.

16. The pharmaceutical composition of any one of claims 1-15, wherein the at least one polypeptide comprises at least one of the following sequences:
(a) TLQRSSLWCL, VLPEPHLAL, HVLPEPHLAL, ALQPLQPHA, AIQPVLWTT, APAIQPVLWTT, SMLTGPPARV, MLTGPPARV, and/or YMFLKAESKI; and/or
(b) MFLKAESKI and/or YMFLKAESKI
(c) VLWTTPPLQH, YMFLKAESK and/or KIMFATLQR; and/or
(d) FATLQRSSL, EPHLALQPL, QPVLWTTPPL, GPPARVPAV, MFATLQRSSL KPKRDGYMF and/or KPKRDGYMFL and/or
(e) IMKPKRDGYM, MFATLQRSSL, FLKAESKIMF, LHFCRSSIM, EPHLALQPL, FATLQRSSL, ESKIMFATL, FLKAESKIM and/or YMFLKAESKI.

17. The pharmaceutical composition of any one of claims 1-16, wherein the at least one polypeptide comprises at least two of the following sequences:
(a) TLQRSSLWCL, VLPEPHLAL, HVLPEPHLAL, ALQPLQPHA, AIQPVLWTT, APAIQPVLWTT, SMLTGPPARV, MLTGPPARV, and/or YMFLKAESKI; and/or
(b) MFLKAESKI and/or YMFLKAESKI; and/or
(c) VLWTTPPLQH, YMFLKAESK and/or KIMFATLQR; and/or
(d) FATLQRSSL, EPHLALQPL, QPVLWTTPPL, GPPARVPAV, MFATLQRSSL KPKRDGYMF and/or KPKRDGYMFL and/or
(e) IMKPKRDGYM, MFATLQRSSL, FLKAESKIMF, LHFCRSSIM EPHLALQPL, FATLQRSSL, ESKIMFATL, FLKAESKIM and/or YMFLKAESKI.

18. The pharmaceutical composition of claim 16 or 17, wherein the mutant GATA3 peptide sequences comprise:
(a) the first mutant GATA3 peptide sequence from (a) and the second mutant GATA3 peptide sequence from (b);
(b) the first mutant GATA3 peptide sequence from (a) and the second mutant GATA3 peptide sequence from (c);
(c) the first mutant GATA3 peptide sequence from (a) and the second mutant GATA3 peptide sequence from (d);
(d) the first mutant GATA3 peptide sequence from (a) and the second mutant GATA3 peptide sequence from (e);
(e) the first mutant GATA3 peptide sequence from (b) and the second mutant GATA3 peptide sequence from (c);
(f) the first mutant GATA3 peptide sequence from (b) and the second mutant GATA3 peptide sequence from (d);
(g) the first mutant GATA3 peptide sequence from (b) and the second mutant GATA3 peptide sequence from (e);
(h) the first mutant GATA3 peptide sequence from (c) and the second mutant GATA3 peptide sequence from (d);
(i) the first mutant GATA3 peptide sequence from (c) and the second mutant GATA3 peptide sequence from (e); or
(j) the first mutant GATA3 peptide sequence from (d) and the second mutant GATA3 peptide sequence from (e).

19. The pharmaceutical composition of any one of claims 1-18, wherein the first mutant GATA3 peptide sequences, and the second mutant GATA 3 peptide sequence comprises a peptide of Table 5 and/or Table 6.

20. The pharmaceutical composition of any one of claims 1-19, wherein the first mutant GATA3 peptide sequence comprises a first neoepitope of GATA3 protein and the second peptide mutant GATA3 peptide sequence comprises a second neoepitope of a mutant GATA protein, wherein the first mutant GATA3 peptide sequence is different from the second mutant GATA3 peptide sequence, and wherein the first neoepitope comprises at least one mutant amino acid and the second neoepitope comprises the same mutant amino acid.

21. The pharmaceutical composition of any one of claims 1-20, wherein each of the first mutant GATA3 peptide sequence and the second mutant GATA3 peptide sequences comprising the at least eight contiguous amino acids are represented by a formula of
[Xaa]_{F}-[Xaa]_{N}-[Xaa]_{C} or [Xaa]_{N}-[Xaa]_{C}-[Xaa]_{F},
wherein each Xaa is an amino acid,
wherein [Xaa]_{N} and [Xaa]_{C} each comprise an amino acid sequence encoded by a different portion of the GATA3 gene,
wherein [Xaa]_{F} is any amino acid sequence,
wherein [Xaa]_{N} is encoded in a non-wild type reading frame of the GATA3 gene,
wherein [Xaa]_{C} comprises the at least one mutant amino acid and is encoded in a non-wild type reading frame of the GATA3 gene,
wherein N is an integer of from 0-100,
wherein C is an integer of from 1-100,
wherein F is an integer of from 0-100,
wherein the sum of N and M is at least 8.

22. The pharmaceutical composition of claim 21, wherein each Xaa of [Xaa]_{F} is a lysine residue and F is an integer of from 1-100, 1-10, 9, 8, 7, 6, 5, 4, 3, 2 or 1.

23. The pharmaceutical composition of claim 22, wherein F is 3, 4 or 5.

24. The pharmaceutical composition of any one of claims 1-23, wherein each of the mutant GATA3 peptide sequences are present at a concentration of at least 50 μg/mL-400 μg/mL.

25. The pharmaceutical composition of any one of claims 1-24, wherein the first mutant GATA3 peptide sequences and the second mutant GATA3 peptide sequence comprises a sequence of Table 1 or 2.

26. The pharmaceutical composition of any one of claims 1-25, wherein the composition further comprises an immunomodulatory agent or an adjuvant.

27. The pharmaceutical composition of claim 26, wherein the adjuvant is polyICLC.

28. A pharmaceutical composition comprising: one or more mutant GATA3 peptide sequence, the one or more mutant GATA3 peptide sequence comprises a sequence selected from group consisting of ESKIMFATLQRSSL, KPKRDGYMFLKAESKI, SMLTGPPARVPAVPFDLH, EPCSMLTGPPARVPAVPFDLH, LHFCRSSIMKPKRDGYMFLKAESKI, GPPARVPAVPFDLHFCRSSIMKPKRD, and KPKRDGYMFLKAESKIMFATLQRSSLWCLCSNH.

29. The pharmaceutical composition of any one of claims 1-28, wherein the pharmaceutical composition comprises a pH modifier present at a concentration of from 0.1 mM-1 mM.

30. The pharmaceutical composition of any one of claims 1-28, wherein the pharmaceutical composition comprises a pH modifier present at a concentration of from 1 mM-10 mM.

31. A method of synthesizing a GATA3 peptide, wherein the peptide comprises a sequence of at least two contiguous amino acids selected from the group consisting of Xaa-Cys, Xaa-Ser, and Xaa-Thr, wherein Xaa is any amino acid, the method comprising:
(a) coupling at least one di-peptide or derivative thereof to an amino acid or derivative thereof of a GATA3 peptide or derivative thereof to obtain a pseudo-proline containing GATA3 peptide or derivative thereof, wherein the di-peptide or derivative thereof comprises a pseudo-proline moiety;
(b) coupling one or more selected amino acids, small peptides or derivatives thereof to the pseudo-proline containing GATA3 peptide or derivative thereof; and
(c) cleaving the pseudo-proline containing GATA3 peptide or derivative thereof from the resin.

32. The method of claim 31, wherein the method comprises deprotecting the pseudo-proline containing GATA3 peptide or derivative thereof.

33. The method of any one of claims 31-32, wherein the amino acid or derivative thereof to which at least one di-peptide or derivative thereof is coupled is selected from the group consisting of Ala, Cys, Asp, Glu, Phe, Gly, Ile, Lys, Leu, Met, Asn, Pro, Gln, Arg, Ser, Thr, Trp, Tyr, His, and Val.

34. The method of any one of claims 31-33, wherein the one or more selected amino acids, small peptides or derivatives thereof optionally coupled to the pseudo-proline containing GATA3 peptide or derivative thereof comprise Fmoc-Ala-OH.H₂O, Fmoc-Cys(Trt)-OH, Fmoc-Asp(OtBu)-OH, Fmoc-Asp(OMpe)-OH, Fmoc-Glu(OtBu)-OH, Fmoc-Phe-OH, Fmoc-Gly-OH, Fmoc-Ile-OH, Fmoc-Lys(Boc)-OH, Fmoc-Leu-OH, Fmoc-Met-OH, Fmoc-Asn(Trt)-OH, Fmoc-Pro-OH, Fmoc-Gln(Trt)-OH, Fmoc-Arg(Pbf)-OH, Fmoc-Ser(tBu)-OH, Fmoc-Thr(tBu)-OH, Fmoc-Trp(Boc)-OH, Fmoc-Tyr(tBu)-OH, Fmoc-Val-OH, Fmoc-His(Trt)-OH and Fmoc-His(Boc)-OH.

35. The method of any one of claims 31-34, wherein an N-terminal amino acid or derivative thereof of the GATA3 peptide or derivative thereof is selected from the group consisting of Fmoc-Ala-OH.H₂O, Fmoc-Cys(Trt)-OH, Fmoc-Asp(OtBu)-OH, Fmoc-Asp(OMpe)-OH, Fmoc-Glu(OtBu)-OH, Fmoc-Phe-OH, Fmoc-Gly-OH, Fmoc-Ile-OH, Fmoc-Lys(Boc)-OH, Fmoc-Leu-OH, Fmoc-Met-OH, Fmoc-Asn(Trt)-OH, Fmoc-Pro-OH, Fmoc-Gln(Trt)-OH, Fmoc-Arg(Pbf)-OH, Fmoc-Ser(tBu)-OH, Fmoc-Thr(tBu)-OH, Fmoc-Trp(Boc)-OH, Fmoc-Tyr(tBu)-OH, Fmoc-Val-OH, Fmoc-His(Trt)-OH and Fmoc-His(Boc)-OH.

36. The method of any one of claims 31-35, wherein the pseudo-proline moiety is
(a) Fmoc-Ser(tBu)-Ser(psi(Me,Me)pro)-OH,
(b) Fmoc-Ala-Thr(psi(Me,Me)pro)-OH,
(c) Fmoc-Glu(OtBu)-Ser(psi(Me,Me)pro)-OH,
(d) Fmoc-Leu-Thr(psi(Me,Me)pro)-OH,
(e) Fmoc-Leu-Cys(psi(Dmp,H)pro)-OH.

37. The method of any one of claims 31-36, wherein
(a) Xaa-Ser is Ser-Ser,
(b) Xaa-Ser is Glu-Ser,
(c) Xaa-Thr is Ala-Thr,
(d) Xaa-Thr is Leu-Thr, or
(e) Xaa-Cys is Leu-Cys.

38. A method of treating a subject with cancer comprising administering to the subject the pharmaceutical composition of any one of claims 1-30.

39. A method of identifying a subject with cancer as a candidate for a therapeutic, the method comprising: identifying the subject as one that expresses a protein encoded by an HLA-A02:01 allele, an HLA-A24:02 allele, an HLA-A03:01 allele, an HLA-B07:02 allele and/or an HLA-B08:01 allele, wherein the therapeutic comprises
(a) at least one polypeptide comprising one or more mutant GATA3 peptide sequences, wherein each of the one or more mutant GATA3 peptide sequences comprises at least one mutant amino acid and is fragment of at least 8 contiguous amino acids of a mutant GATA3 protein arising from a mutation in a GATA3 gene of a cancer cell; or
(b) at least one polynucleotide comprising a sequence encoding the at least one polypeptide, wherein each of the one or more mutant GATA3 peptide sequences or a portion thereof binds to a protein encoded by an HLA-A02:01 allele, an HLA-A24:02 allele, an HLA-A03:01 allele, an HLA-B07:02 allele and/or an HLA-B08:01 allele.

40. The method of claim 39, wherein the method further comprises administering the therapeutic to the subject.

41. A method of treating a subject with cancer comprising administering to the subject a pharmaceutical composition comprising:
(a) at least one polypeptide comprising a first mutant GATA3 peptide sequence and a second mutant GATA3 peptide sequence, wherein
(i) the first mutant GATA3 peptide sequence and the second mutant GATA3 peptide sequence each comprise at least 8 contiguous amino acids of SEQ ID NO: 1, and
(ii) a C-terminal sequence of the first mutant GATA3 peptide sequence overlaps with an N-terminal sequence of the second mutant GATA3 peptide sequence; wherein the at least 8 contiguous amino acids of SEQ ID NO: 1 comprises at least one amino acid of sequence PGRPLQTHVL PEPHLALQPLQPHADHAHADAPAIQPVLWTTPPLQHGHRHGLEPCSMLTGPPARVPAVP FDLHFCRSSIMKPKRDGYMFLKAESKIMFAT LQRSSLWCLCSNH (SEQ ID NO: 2); or
(b) at least one polynucleotide comprising a sequence encoding the at least one polypeptide, wherein HLA alleles expressed by subject are unknown at the time of administering.

42. The method of claim 41, wherein the at least 8 contiguous amino acid of SEQ ID NO: 1 comprises at least one amino acid of sequence: PGRPLQTHVLPEPHLALQPLQPHADHAHADAPAIQPVLWTTPPLQHGHRHGLEPCSMLTGPPAR VPAVPFDLHFCRSSIMKPKRDGYMFLKAESKIMFAT LQRSSLWCLCSNH (SEQ ID NO: 2).

43. The method of any one of claims 41-42, wherein the cancer is selected from the group consisting of melanoma, ovarian cancer, lung cancer, prostate cancer, breast cancer, colorectal cancer, endometrial cancer, and chronic lymphocytic leukemia (CLL).

44. The method of any one of claims 41-43, wherein the subject has a breast cancer that is resistant to anti-estrogen therapy, is an MSI breast cancer, is a metastatic breast cancer, is a Her2 negative breast cancer, is a Her2 positive breast cancer, is an ER negative breast cancer, is an ER positive breast cancer, PR positive breast cancer, PR negetive breast cancer or any combination thereof.

45. The method of claim 44, wherein the breast cancer expresses an estrogen receptor with a mutation.

46. The method of any one of claims 41-45, further comprising administering at least one additional therapeutic agent or modality.

47. The method of claim 46, wherein the at least one additional therapeutic agent or modality is surgery, a checkpoint inhibitor, an antibody or fragment thereof, a chemotherapeutic agent, radiation, a vaccine, a small molecule, a T cell, a vector, and APC, a polynucleotide, an oncolytic virus or any combination thereof.

48. The method of claim 47, wherein the at least one additional therapeutic agent is an anti-PD-1 agent and anti-PD-L1 agent, an anti-CTLA-4 agent, an anti-CD40 agent, letrozole, fulvestrant, a PI3 kinase inhibitor and/or a CDK 4/6 inhibitor.

49. The method of claim 47, wherein the at least one additional therapeutic agent is palbociclib, ribociclib, abemaciclib, seliciclib, dinaciclib, milciclib, roniciclib, atuveciclib, briciclib, riviciclib, seliciclib, trilaciclib, voruciclib or any combination thereof.

50. The method of claim 47, wherein the at least one additional therapeutic agent is palbociclib (PD0332991); abemaciclib (LY2835219); ribociclib (LEE 011); voruciclib (P1446A-05); fascaplysin; arcyriaflavin; 2-bromo-12,13-dihydro-5H-indolo[2,3-a]pyrrolo[3,4-c]carbazole-5,7(6H)-dione; 3-amino thioacridone (3-ATA), trans-4-((6-(ethylamino)-2-((1-(phenylmethyl)-1H-indol-5-yl)amino)-4-pyrimidinyl)amino)-cyclohexano (CINK4); 1,4-dimethoxyacridine-9(10H)-thione (NSC 625987); 2-methyl-5-(p-tolylamino)benzo[d]thiazole-4,7-dione (ryuvidine); flavopiridol (alvocidib); seliciclib; dinaciclib; milciclib; roniciclib; atuveciclib; briciclib; riviciclib; trilaciclib (G1T28); or any combination thereof.

51. The method of claim 47, wherein the at least one additional therapeutic agent is Wortmannin, Demethoxyviridin, LY294002, hibiscone C, Idelalisib, Copanlisib, Duvelisib, Taselisib, Perifosine, Buparlisib, Duvelisib, Alpelisib (BYL719), Umbralisib, (TGR 1202), Copanlisib (BAY 80-6946), PX-866, Dactolisib, CUDC-907, Voxtalisib (SAR245409, XL765), CUDC-907, ME-401, IPI-549, SF1126, RP6530, INK1117, pictilisib (GDC-0941), XL147 (SAR245408), Palomid 529, GSK1059615, ZSTK474, PWT33597, IC87114, TG100-115, CAL263, RP6503, PI-103, GNE-477 or AEZS-136.

52. The method of any one of claims 41-51, wherein the cancer is recurrent or metastatic breast cancer.

53. The method of any one of claims 41-52, wherein the subject is a subject that has had disease progression following endocrine therapy in combination with a CDK 4/6 inhibitor; or wherein the subject has not received prior systemic therapy.

54. The method of any one of claims 41-53, wherein the method comprises determining a mutation status of an estrogen receptor gene of cells of the subject.

55. The method of claim 54, wherein the cells are isolated cells or cells enriched for expression of estrogen receptor.
